(19) United States
(12) Patent Application Publication
(10) Pub. No.: US 2019/0031759 A1
(43) Pub. Date: Jan. 31, 2019

(54) CHIMERIC ANTIGEN RECEPTORS AND METHODS OF THEIR USE

(71) Applicant: Technion Research & Development Foundation Limited, Haifa (IL)

(72) Inventors: Yoram REITER, Haifa (IL); Ravit OREN, Haifa (IL); Maya COHEN, Moshav HaBonim (IL)

(21) Appl. No.: 15/570,427

(22) PCT Filed: Apr. 30, 2015
(86) PCT No.: PCT/IL2015/050458

§ 371 Date: Oct. 30, 2017

(51) Int. Cl. C07K 16/28

(52) U.S. Cl. CPC C07K 16/2833; C07K 2319/03; C07K 2317/622; C07K 2317/92; C07K 2319/02

(57) ABSTRACT

Provided are chimeric antigen receptor (CAR) molecules comprising an extracellular domain comprising an antigen binding domain, a transmembrane domain, and an intracellular signaling domain, wherein an affinity of said binding domain to said antigen is characterized by a K_{D} higher than 150 nM. Also provided are isolated polynucleotides and nucleic acid constructs comprising same, cells transduced with same and methods of using same.

### FIELD AND BACKGROUND OF THE INVENTION

[0001] The present invention, in some embodiments thereof, relates to chimeric antigen receptors, cells transduced with same and, more particularly, but not exclusively, to methods of using same for treating various pathologies, such as cancer and autoimmune diseases, as well as infection diseases caused by viral or bacterial infections.

[0002] Adoptive transfer of antigen-specific T lymphocytes is an attractive form of immunotherapy for hematological malignancies and solid cancers. This approach, in which tumor reactive T cells undergo ex-vivo expansion and are then infused back to patients, has proven to be effective in metastatic melanoma patients. However, the widespread use of this approach is limited by the need to isolate antigen-specific T lymphocytes for individual patients.

[0003] To overcome this difficulty, the strategy of engineered T cells (CAR) has been developed, which involves genetic modifications based on 2 different approaches reviewed in Restifo, et al., 2012 (Adoptive immunotherapy for cancer: harnessing the T cell response. Nat Rev Immunol 12: 269-281).

[0004] In the first approach, tumor targeting by T cells is achieved using a cloned αβ TCR which is introduced into the cells and enables specific MHC-restricted targeting of tumor cells. This approach has been proven effective in clinical trials in melanoma) and several groups are currently working to improve the expression of the exogenous TCR on the surface of T cells.

[0005] The second strategy involves redirection of T cells based on antibody variable fragments (Fv). The availability of anti-tumor antibodies targeting a variety of tumors prompted the idea of incorporating the recognition domain of these antibodies in the form of single chain Fv (scFv) domain in a chimeric receptor construct (13). This chimeric antibody-based or antigen receptor (CAR) is based on linking the recognition elements of an antibody to signaling moieties for T cell activation, thereby redirecting T cells to a desired antigen in an either non-MHC restricted or an MHC restricted manner.

[0006] In the non-MHC restricted manner, T cells are redirected independently of MHC and proved to be effective against tumor cells that lost their HLA expression due to tumor escape mechanisms (14). After several studies in the last decade that demonstrated the effectiveness of this approach in inducing tumor regression in mouse models, this approach is currently being evaluated in clinical trials (15-17). Furthermore, this strategy has shown dramatic responses in a pilot clinical trial in chronic lymphocytic leukemia (CLL) patients treated with CD19-specific CAR T cells (18). Targeting tumor-associated antigens with engineered T cells that express a specific CAR is an ideal approach combining the unique expression pattern of tumor associated antigens (TAAs) with potent killing mediated by the engineered effector T cell (19).

[0007] For an MHC restricted manner, antibodies which recognize specific peptide/MHC complexes (termed “TCR like antibodies, or TCRLs) can be used (26). The present inventors and others have isolated antibodies which recognize HLA-A2 complexes bearing peptides derived from tumor and viral antigens by means of phage display and hybridoma strategies (27-30). These TCR-like antibodies, which exhibit both binding properties and kinetics of antibodies (e.g., high affinity), while mimicking the specificity of TCRs, are being used as a novel research tool to study antigen presentation and immunotherapy targets.

[0008] Wilm's tumor suppressor gene 1 (WT1) is one of the most important TAAs classified by the National Cancer Institute (NCI). WT1, a zinc finger transcription factor, is highly expressed in many solid cancers and leukemia cells, but not in normal tissues (including hematopoetic progenitor and stem cells). Several studies have suggested that WT1 may have an essential role in leukemogenesis/tumorgenesis, and is required to maintain the transformed phenotype/function; therefore, tumor escape from immune surveillance as a result of down-regulation of WT1 expression is unlikely to occur, marking WT1 as an attractive and important target for immunotherapy.

[0009] The WT1_{Db126} (RMFPNAPYL; SEQ ID NO:1) peptide was identified by screening the WT1 amino acid sequence (GenBank Accession NO. EAW68225, Wilms tumor 1, isoform CRA_f; SEQ ID NO:3) for 9-mer peptides that include major anchor motifs for binding to HLA-A2 (24). In-vitro immunization elicits WT1 peptide-specific CTLs which mediate lysis of WT1-expressing tumor cells, indicating that this peptide constitutes a highly immunogenic epitope. The αβ genes of a TCR which recognizes HLA-A2-WT1_{Db126} complexes were isolated using an allogeneic repertoire, and were introduced by retroviral transduction into human T cells (7). This TCR exhibited efficient and specific reactivity with HLA-A2-WT1_{Db126} complexes, enabling specific cytolytic reactivity by CTLs expressing the TCR toward target cells (25).

[0010] CARs have been successfully used in the treatment of various leukemias, and they are currently being used in clinical trials also for various solid tumors, however, their use is limited by the number of cancer cells which are not recognized by T cells, mainly due to limited availability of tumor-specific T cells and deficiencies in antigen processing or major histocompatibility complex (MHC) expression of cancer cells. Additional background art includes Chmielewski et al., 2013 (Antigen-specific T-cell activation independently of the MHC: chimeric antigen receptor-redirected T cells. Frontiers in Immunology, vol. 4, article 371), U.S. Patent Application No. 20130287748.

### SUMMARY OF THE INVENTION

[0011] According to an aspect of some embodiments of the present invention there is provided a chimeric antigen receptor (CAR) molecule comprising an extracellular domain comprising an antigen binding domain, a transmembrane domain, and an intracellular signaling domain, wherein an affinity of the binding domain to the antigen is characterized by a K_{D} higher than 150 nM.

[0012] According to an aspect of some embodiments of the present invention there is provided an isolated polynucleotide comprising a nucleic acid sequence encoding the molecule of some embodiments of the invention.

[0013] According to an aspect of some embodiments of the present invention there is provided a nucleic acid construct comprising an isolated polynucleotide comprising a nucleic acid sequence encoding the molecule of some embodiments of the invention and a cis-acting regulatory element for directing transcription of the isolated polynucleotide in a host cell.

[0014] According to an aspect of some embodiments of the present invention there is provided an isolated cell comprising the polynucleotide of claim of some embodiments of the invention or the nucleic acid construct of some embodiments of the invention.

[0015] According to an aspect of some embodiments of the present invention there is provided a pharmaceutical composition comprising the CAR molecule of some embodiments of the invention, the isolated polynucleotide of some embodiments of the invention, the nucleic acid construct of some embodiments of the invention or the cell of some embodiments of the invention and a pharmaceutically acceptable carrier.

[0016] According to an aspect of some embodiments of the present invention there is provided an in vitro method of generating a medicament for treating a pathology in a subject in need thereof, comprising:

(a) obtaining T cells or natural killer (NK) cells,
(b) transducing the T cells or the natural killer with the nucleic acid construct of some embodiments of the invention, wherein binding of the molecule to the antigen elicits a therapeutic response by the T cells or the natural killer of the subject, thereby generating the medicament for treating the pathology.

[0017] According to an aspect of some embodiments of the present invention there is provided a method of treating a pathology in a subject in need thereof, comprising administering the medicament resultant of claim 36 in the subject, thereby treating the pathology in the subject.

[0018] According to some embodiments of the invention, the antigen is an MHC restricted antigen.

According to some embodiments of the invention, the MHC restricted antigen comprises an MHC class I restricted antigen.

[0019] According to some embodiments of the invention, the MHC restricted antigen comprises an MHC class II restricted antigen.

[0020] According to some embodiments of the invention, the antigen is a non-MHC restricted antigen.

[0021] According to some embodiments of the invention, the MHC-restricted antigen is a tumor associated antigen.

[0022] According to some embodiments of the invention, the MHC-restricted antigen is a viral antigen.

[0023] According to some embodiments of the invention, the MHC-restricted antigen is an autoimmune antigen.

[0024] According to some embodiments of the invention, the tumor associated antigen comprises the WT1 protein.

[0025] According to some embodiments of the invention, the tumor associated antigen comprises the tyrosinase protein.

[0026] According to some embodiments of the invention, the MHC-restricted tumor associated antigen is the WT1_{Db126} peptide set forth in SEQ ID NO:1.

[0027] According to some embodiments of the invention, the wherein the antigen binding domain comprises CDRs which are derived from an antibody.

[0028] According to some embodiments of the invention, the wherein the antigen binding domain comprises CDRs which are derived from a T cell receptor (TCR).

[0029] According to some embodiments of the invention, the wherein the antigen binding domain comprises a single chain Fv (scFv) molecule.

[0030] According to some embodiments of the invention, the tumor associated antigen is selected from the group consisting of: Uroplakin II (UPKII), Uroplakin Ia (UPK1A), prostate specific antigen (NPSA), prostate specific membrane antigen (PSCA), prostate acid phosphatase (ACPP), BA-46, MFGE8 milk fat globule-EGF factor 8 protein [lactadherin], Mucin 1 (MUC1), premelanosome protein (PMEL, Gp100), melan-A (MLANA, MART1), telomerase reverse transcriptase (TERT), TAX, NY-ESO cancer/testis antigen 1B (CTAG1B), Melanoma antigen family A1 (MAGEA1), Melanoma antigen family A3 (MAGEA3, MAGE-A3), erb-b2 receptor tyrosine kinase 2 (ERBB2, HER2), Beta-catenine (CTNNB1), Tyrosinase (TYR), and Bcr-abl, caspase 8 (CASP8).

[0031] According to some embodiments of the invention, the viral antigen is derived from a virus selected from the group consisting of: human immunodeficiency virus (HIV), influenza, Cytomegalovirus (CMV), T-cell leukaemia virus type 1 (TAX), hepatitis C virus (HCV) and hepatitis B virus (HBV).

[0032] According to some embodiments of the invention, the autoimmune antigen is associated with type 1 diabetes, the autoimmune antigen is derived from a polypeptide selected from the group consisting of: preproinsulin, proinsulin, Glutamic acid decarboxylase (GAD), Insulinoma Associated protein 2 (IA-2), IA-20 (phogrin), Islet-specific Glucose-6-phosphatase catalytic subunit-Related Protein (IGRP), chromogranin A, Zinc Transporter 8 (ZnT8), Heat Shock Protein-60 (HSP-60), and Heat Shock Protein-70 (HSP-70).

[0033] According to some embodiments of the invention, the autoimmune antigen is associated with multiple sclerosis the autoimmune antigen is derived from a polypeptide selected from the group consisting of: myelin oligodendrocyte glycoprotein (MOG), myelin basic protein (MBP), and proteolipid protein (PLP1).

[0034] According to some embodiments of the invention, the autoimmune antigen is associated with rheumatoid arthritis the autoimmune antigen is derived from a polypeptide selected from the group consisting of: Collagen II (COL2A1), Matrix metalloproteinase-1 (MMP1), Aggrecan Core Protein Precursor (ACAN), Matrix Metalloproteinase-16 (MMP16), Tenascin (TNXB) and Heterogeneous Nuclear Ribonucleoprotein A2 (HNRNPA2B1).

[0035] According to some embodiments of the invention, the autoimmune antigen is associated with celiac the autoimmune antigen is derived from a polypeptide selected from the group consisting of: alpha Gliadin, gamma Gliadin and Heat shock 20. According to some embodiments of the invention, the autoimmune antigen is associated with stroke the autoimmune antigen is derived from a polypeptide selected from the group consisting of: myelin basic protein, neurofilament and NR2A/2B subtype of the N-methyl-D-aspartate receptor.

[0036] According to some embodiments of the invention, the non-MHC restricted antigen is selected from the group consisting of a-Folate receptor, CAIX, CD19, CD20, CD22, CD30, CD33, CD44v7/8, CEA, EGP-2, EGP-40, erb-B2, erb-B 2,3,4, FBP, Fetal acetylcholine receptor, GD2, GD3, Her2/neu, IL-13R-a2, KDR, k-light chain, LeY, L1 cell adhesion molecule, MAGE-A1, Mesothelin, Murine CMV infected cells, MUC1, NKG2D ligands, Oncofetal antigen (h5T4), PSCA, PSMA, TAA targeted by mAb IgE, TAG-72, and VEGF-R2.

[0037] According to some embodiments of the invention, the K_{D} is higher than 400 nM.

[0038] According to some embodiments of the invention, the K_{D} is selected from a range of about 200 nM (nanomolar) to about 5 μM (micromolar).

[0039] According to some embodiments of the invention, the intracellular signaling domain comprises the polypeptide selected from the group consisting of: CD3ζ (CD247, CD3z), CD28, 4-1BB (CD137), ICOS, and OX40.

[0040] According to some embodiments of the invention, the cell is a T cell or natural killer (NK) cell.

[0041] According to some embodiments of the invention, the T cell is obtained from peripheral blood mononuclear cells (PBMCs).

[0042] According to some embodiments of the invention, the T cell comprises a Treg (T regulatory cell).

[0043] According to some embodiments of the invention, the T cell comprises a CD4 T cell.

[0044] According to some embodiments of the invention, the T cell comprises a CD8 T cell.

[0045] According to some embodiments of the invention, the T cell is a cytotoxic T cell.

[0046] According to some embodiments of the invention, the T cells or the natural killer are autologous to the subject.

[0047] According to some embodiments of the invention, the T cells or the natural killer are semi-autologous to the subject.

[0048] According to some embodiments of the invention, the T cells or the natural killer are non-autologous to the subject.

[0049] According to some embodiments of the invention, the T cells are obtained from peripheral blood mononuclear cells (PBMCs) of the subject in need thereof.

[0050] According to some embodiments of the invention, the pathology is a solid tumor.

[0051] According to some embodiments of the invention, the pathology is a viral infection.

[0052] According to some embodiments of the invention, the pathology is an autoimmune disease.

[0053] Unless otherwise defined, all technical and/or scientific terms used herein have the same meaning as commonly understood by one of ordinary skill in the art to which the invention pertains. Although methods and materials similar or equivalent to those described herein can be used in the practice or testing of embodiments of the invention, exemplary methods and/or materials are described below. In case of conflict, the patent specification, including definitions, will control. In addition, the materials, methods, and examples are illustrative only and are not intended to be necessarily limiting.

### BRIEF DESCRIPTION OF THE DRAWINGS

[0054] The patent or application file contains at least one drawing executed in color. Copies of this patent or patent application publication with color drawing(s) will be provided by the Office upon request and payment of the necessary fee.

[0055] Some embodiments of the invention are herein described, by way of example only, with reference to the accompanying drawings. With specific reference now to the drawings in detail, it is stressed that the particulars shown are by way of example and for purposes of illustrative discussion of embodiments of the invention. In this regard, the description taken with the drawings makes apparent to those skilled in the art how embodiments of the invention may be practiced.

[0056] In the drawings:

[0057] FIGS. 1A-C show binding properties of F2 and F3 anti-HLA-A2/WT1_{Db126} TCR-like recombinant antibodies. FIG. 1A—ELISA of anti-HLA-A2-WT1_{Db126} soluble purified Fabs with immobilized HLA-A2-WT1_{Db126} complexes versus control complexes displaying control peptide. Anti-HLA mAb W6/32 was used to determine the correct folding and stability of the bound complexes during the binding assay. FIG. 1B—Flow cytometry analysis of the binding of F2 and F3 Fabs to T2 cells loaded with WT1_{Db126} peptide or to the control peptides 209m (SEQ ID NO:12), Gag (SEQ ID NO:14) and mdm2 (SEQ ID NO:15). FIG. 1C—Surface plasmon resonance (SPR) analysis of F2 and F3 Fabs for affinity to HLA-A2-WT1_{Db126} complexes which was determined as 400 nM and 30 nM, respectively.

[0058] FIG. 2 shows reactivity of F2 anti-HLA-A2-WT1_{Db126} TCR-like Fab with tumor cell lines. Detection of HLA-A2-WT1_{Db126} complexes on the surface of HLA-A2⁺ WT1⁺ cell lines: 501A and Skmel5 melanoma cell lines; Loucy ALL cell line; CCRF-SB (data not shown) and DG75 lymphoma cell line; MDA-MB-231 human breast carcinoma; SW620, Caco-2 and colo-205 human colon cancer; Panc-1 human pancreatic carcinoma; Hep-G2 (data not shown) liver hepatocellular carcinoma; UMUC3 human bladder transitional cell carcinoma, and BV173 leukemia cell line (ALL). Cells were incubated with anti-HLA-A2-WT1_{Db126} TCR-like Fabs, followed by incubation with PE-labeled anti-human Ab. HLA-A2-negative (WT1-positive) A431 epidermoid carcinoma cell line and WT1-positive (HLA-A2-negative). Fibroblast cells (Fibs) were used as controls.

[0059] FIG. 3 shows expression of TCR like chimeric receptor on transduced Jurkat cells. Jurkat cells were transduced with retroviral vector encoding the 400 nM F2 anti-HLA-A2-WT1_{Db126} chimeric receptor construct; 96 hours after transduction, cells were stained with PE-labeled-HLA-A2 tetramers presenting the WT1_{Db126} specific peptide or control peptides and were analysed by flow cytometry. GFP expression represents positive transduced Jurkat cells.

[0060] FIGS. 4A-B depict expression of TCR-like chimeric receptors on transduced human T cells. HLA-A2+(FIG. 4A) and HLA-A2⁻ (FIG. 4B) activated primary T cells were transduced with either vector encoding the F2 or F3 TCR like chimeric receptors; 48 hours after transduction the cells were stained with anti-CD3 and anti-CD8 Abs and with the fluorescently labelled HLA-A2-WT1_{Db126} tetramer. Cells were gated on the CD3+ T cell populations.

[0061] FIG. 5 depicts expression of F2 TCR like chimeric receptor and WT1_{Db126} αβTCR construct (marked “TCR” in FIG. 5) on transduced human T cells. HLA-A2⁺ activated primary T cells were transduced with either a vector encoding the αβTCR or F2 chimeric receptor; 48 hours after transduction the cells were stained with anti-CD3, CD8, Vβ2.1 (an antibody directed against the variable chain of the β chain of the αβTCR) antibodies or HLA-A2-WT1_{Db126} tetramer. Cells were gated on the CD3+ T cell populations.

[0062] FIGS. 6A-C depict response of CARs transduced T cells to antigen-specific stimulation. FIG. 6A—FACS analysis of freshly transduced T cells with either 400 nM F2 TCR-like chimeric receptor (left panels) or WT1_{Db126} αβTCR (right panels). Transduced cells were stimulated for 18 hours with T2 cells loaded with 100 μM either relevant (WT1_{Db126}; SEQ ID NO:1) or control (WT1₂₃₅; SEQ ID NO:7) peptide. Cells were stained for CD8, and then fixed, permeabilized and stained with anti-IFN-gamma and anti-IL2 Abs followed by flow cytometry analysis. Shown is the percentage of CD8⁺ T expressing IFN-gamma and IL-2. The percentage of positive transduced CD8+ cells was 30% and 42% for TCR and F2, respectively. FIG. 6B—ELISA assay for IFN-gamma release. Transduced T cells were stimulated for 18 hours with T2 cells loaded with decreasing dilutions of relevant (WT_{Db126}) peptide (100 μM to 0.1 μM) or control (Gp100-280) peptide. Interferon (IFN)-gamma release was determined by ELISA. The percentage of positive transduced CD8⁺ cells was 57% and 41% for TCR and F2, respectively. The percentage of positive transduced CD4⁺ cells was 48% and 30% for TCR and F2, respectively. This is a representative of 3 independent experiments showing similar results. FIG. 6C—Flow cytometry for CD107a expression on CD8+ T cell. Transduced T cells were stimulated for 4 hours with T2 cells loaded with decreasing dilutions of relevant (WT_{Db126}) peptide (100 μM to 0.1 μM) or control (Gp100-280) peptide. Percent of CD107a was determined by Flow cytometry. This is a representative of 3 independent experiments showing similar results.

[0063] FIGS. 7A-C depict antigen-specific cytotoxic activity of CARs transduced T cells. FIG. 7A—Transduced T cells were cultured in a 4-hour assay with ³⁵S-labeled T2 cells loaded with either 100 μM relevant (WT1_{Db126}) or control (Gp100-280) peptide at the stated E:T ratios. This is a representative of 3 independent experiments showing similar results. FIG. 7B—Transduced T cells were cultured in a 4-hour assay with ³⁵S-labeled T2 cells, loaded with decreasing dilution of WT1_{Db126} peptide (100 μM to 0.1 μM) or control peptideGp100-280 (100 μm), at an E:T ratio of 5:1. This is a representative of 3 independent experiments showing similar results. In both assays the amount of positive transduced cells added was normalized respectively to the highest percent of transduced cell. FIG. 7C—Transduced T cells were cultured in a 4-hour assay with ³⁵S-labeled 501A Melanoma and Breast MDA231 (HLA-A2+WT1_{Db126+}) or control A431 (HLA-A2-WT1_{Db126+}) at the stated E:T ratios. In all assays, the percentage of positive transduced CD8⁺ cells was 57% and 41% for TCR and F2, respectively. The percentage of positive transduced CD4⁺ cells was 48% and 30% for TCR and F2. A and C represent a typical experiment out of 3 independent repetitions.

[0064] FIGS. 8A-D depict antigen-specific cytotoxic activity of CD8 and CD4 transduced T cells. Purified CD4 and CD8 subpopulations were obtained by incubating the T cells with anti-CD4, anti-CD8 and anti-mouse IgG-coated magnetic beads. FIG. 8A—Transduced purified CD8 T cells were cultured in a 4-hour assay with ³⁵S-labeled T2 cells, loaded with decreasing dilution of WT1_{Db126} peptide (100 μM to 0.1 μM) or control peptideGp100-280 (100 μm), at an E:T ratio of 5:1. FIG. 8B—Transduced purified CD8 T cells were cultured in a 4-hour assay with ³⁵S-labeled T2 cells loaded with either 100 μM relevant (WT1_{Db126}) or control (Gp100-280) peptide at the stated E:T ratios. FIG. 8C—Transduced purified CD4 T cells were cultured in a 4-hour assay with ³⁵S-labeled T2 cells, loaded with decreasing dilution of WT1_{Db126} peptide (100 μM to 0.1 μM) or control peptideGp100-280 (100 μm), at an E:T ratio of 5:1. FIG. 8D—Transduced purified CD4 T cells were cultured in a 4-hour assay with ³⁵S-labeled T2 cells loaded with either 100 μM relevant (WT1_{Db126}) or control (Gp100-280) peptide at the stated E:T ratios. This is a representative of 3 independent experiments showing similar results. In all assays the amount of positive transduced CD8 and CD4 F2 and TCR CD8 and CD4 T cells added was normalized respectively to 60% which was the highest percent of transduce CD8 TCR transduced cell.

[0065] FIGS. 9A-B provide the sequences of the F2 T body (CAR) VL-VH in pBULLET. FIG. 9A—amino acid sequence; FIG. 9B—nucleic acid sequence. Color index: Red=Leader (SEQ ID NOs:20-21); Green=VL (SEQ ID NOs:16 and 18); Dark blue=Linker (SEQ ID NOs:2 and 23); Orange=VH (SEQ ID NOs:17 and 19); Light blue=CD28 (SEQ ID NOs:24-25); Purple=“gamma” (FcγRI γ) (SEQ ID NOs:26-27).

[0066] FIGS. 10A-B provide the sequences of the F3 T body (CAR) VL-VH in pBULLET. FIG. 9A—amino acid sequence; FIG. 9B—nucleic acid sequence. Color index: Red=Leader (SEQ ID NOs:20-21); Green=VL (SEQ ID NOs: 28 and 30); Dark blue=Linker (SEQ ID NOs: 2 and 23); Orange=VH (SEQ ID NOs:29 and 31); Light blue=CD28 (SEQ ID NOs:24-25); Purple=“gamma” (FcγRI γ) (SEQ ID NOs:26-27).

### DESCRIPTION OF SPECIFIC EMBODIMENTS OF THE INVENTION

[0067] The present invention, in some embodiments thereof, relates to chimeric antigen receptor molecules, nucleic acid constructs comprising same, cells transformed with same and, more particularly, but not exclusively, to methods of using same for generating a medicament for treating viral infections, bacterial infections, cancer and autoimmune diseases. Thus, the present invention relates to a strategy of adoptive cell transfer of cells (e.g., T cells or NK cells) transduced to express a chimeric antigen receptor (CAR).

[0068] Before explaining at least one embodiment of the invention in detail, it is to be understood that the invention is not necessarily limited in its application to the details set forth in the following description or exemplified by the Examples. The invention is capable of other embodiments or of being practiced or carried out in various ways.

[0069] The present study investigates how the differences in affinity and avidity of an αβ TCR versus a TCR-like antibody-based CAR play a functional role in engineered T cells that carry these recognition moieties. The present inventors have isolated TCR-like Fab antibodies which recognize the HLA-A2 molecule bearing the WT1-derived peptide (WT1_{Db126}; RMFPNAPYL) with different affinities (400 nM and 30 nM as determined by Surface plasmon resonance (SPR) analysis (FIG. 1C)). CARs in which the antigen binding domain includes the VH and VL sequences of a TCR-like receptor (e.g., the F2 and F3 antibodies) were generated based on the isolated Fabs and used to redirect T cells toward HLA-A2-WT1_{Db126} (FIGS. 1-3 and 9-10 and Examples 1 and 2 of the Examples section which follows). In comparison, the present inventors used engineered T cells that carry αβ TCR genes targeting the same WT1-specific epitope. These redirected T cells exhibited efficient and specific reactivity with HLA-A2-WT1_{Db126} complexes. T cells transduced with CAR molecules which include either the F2 or the F3 TCRL were shown to efficiently express the F2 and F3 TCRLs (FIG. 4A), however, the viability of the T cells transduced with the high affinity (30 nM) F3 TCRL was very low. Without being bound by any theory, these results suggest that the elevated affinity of the 30 nM F3 TCR-like CAR, in combination with the high avidity of the receptor present on the T cell surface, may lead to some loss of specificity and consequently to decreased cell survival.

[0070] Using these TCR-like antibody-based CARs and the recombinant αβTCR based CAR, the present inventors directly compared, for the first time, 2 different approaches for redirecting T cells in order to enhance the understanding of the influence and relationships of affinity and avidity on the biological functions of T cells being redirected by either cloned αβ TCRs or TCR-like antibodies based CARs.

[0071] Example 3 of the Examples section which follows demonstrates efficient transductions of HLA-A2+ T cells transduced with either the αβTCR CAR construct or the F2 TCR like CAR construct (FIG. 5). Moreover, Example 4 (FIG. 6B) demonstrates determination of T cells avidity using interferon release assays and shows that the avidity of the T cells transduced with the CAR of WT1 αβTCR is between 3-10 μM, e.g., about 5 μM, and the avidity of the T cells transduced with the CAR of F2 TCRL is about 10 μM.

[0072] In addition, T cells transduced with the αβTCR showed greater specific cytolytic activity than T cells transduced with the F2 TCR-like Ab CAR (FIG. 7A and Example 5 of the Examples section which follows). Moreover, the sensitivity of the αβTCR-transduced T cells was indeed greater compared with the TCR-like Ab-transduced cells as the αβTCR cells were more efficient in mediating killing of WT1_{Db126} loaded T2 cells at low peptide concentrations (FIG. 7B and Example 5 of the Examples section which follows). These results further correspond to the killing sensitivity of the αβTCR transduced T cells (FIG. 7C and Example 5). Moreover, αβTCR CAR-transduced CD8+ T cells were more active compared to F2 TCRL CAR-transuded cells similarly with what was observed with the intact whole T cell population (FIGS. 8A-D; Example 6). Altogether, these results support the findings that an upper affinity threshold for TCR-based recognition is required to mediate effective and optimal functional activity in killing of target cells. In this context, high affinity CARs which can be composed of TCRL antibody variable fragments, or affinity enhanced αβTCRs are less suitable and attractive than native αβTCR or TCRL antibodies with moderate affinity (e.g., having a K_{D} higher than 150 nM) for the design of CARs.

[0073] The present inventors demonstrate herein that the combination of high affinity and avidity of a TCR-like antibody displayed on the surface of the engineered T cells has dramatic effects on the specificity and function of these T cells compared to engineered T cells carrying a low affinity αβ TCRs. The present inventors thus present evidence for a TCR-based affinity threshold which limits the maximal T-cell effective function and suggests that rational design of improved TCRs or TCR-like antibodies for T-cell redirection may need to be optimized up to a given affinity threshold in order to achieve optimal T cell function without risking cross reactivity. The comparison presented herein enables better understanding of limits and thresholds in T-cell recognition using these 2 different approaches, and clarifies the optimal recognition properties required for most effective and specific T cell retargeting toward tumor cells.

[0074] Thus, according to an aspect of an embodiment of the invention there is provided a chimeric antigen receptor (CAR) molecule comprising an extracellular domain comprising an antigen binding domain, a transmembrane domain, and an intracellular signaling domain, wherein an affinity of the binding domain to the antigen is characterized by a K_{D} higher than 150 nM.

[0075] As used herein the phrase “chimeric antigen receptor (CAR)” refers to a recombinant or synthetic molecule which combines antibody-based specificity for a desired antigen with a T cell receptor-activating intracellular domain to generate a chimeric protein that exhibits cellular immune activity to the specific antigen.

[0076] The choice of antigen binding domain (or moiety) depends upon the type and number of ligands that define the surface of a target cell. For example, the antigen binding domain may be chosen to recognize a ligand that acts as a cell surface marker on target cells associated with a particular disease state. Thus examples of cell surface markers that may act as ligands for the antigen binding domain in the CAR molecule of the invention include those associated with viral, bacterial and parasitic infections, autoimmune disease and cancer cells.

[0077] The term “antigen” or “Ag” as used herein is defined as a molecule that provokes an immune response. The skilled artisan will understand that any macromolecule, including virtually all proteins or peptides, as well as carbohydrates, lipids and DNA can serve as an antigen.

According to some embodiments of the invention, the antigen is a tumor antigen (e.g., tumor specific antigen or a tumor associated antigen), a viral protein antigen, a bacterial protein antigen, or an autoimmune associated antigen (e.g., a “self” antigen).

[0078] According to some embodiments of the invention, the antigen is presented by an MHC molecule.

[0079] According to some embodiments of the invention, the antigen is not presented on MHC molecule.

[0080] According to some embodiments of the invention, the antigen to which the CAR molecule binds is a protein-derived antigen.

[0081] Thus, the extracellular domain of the CAR molecule comprises an antigen binding domain, wherein an affinity of the antigen binding domain to the antigen is characterized by a K_{D} which is higher than 150 nM. It should be noted that an affinity characterized by a K_{D} higher than 150 nM is considered a relatively low affinity as compared to an affinity between an antibody and its antigen.

[0082] The affinity of the antigen binding domain to its antigen is determined using the soluble molecules from which the CDRs of the antigen binding domain of the CAR were derived.

[0083] As used herein the term “K_{D}” refers to the equilibrium dissociation constant between the antigen binding domain and its respective antigen.

[0084] According to some embodiments of the invention, such affinity to the antigen (which is characterized by a K_{D} higher than 150 nM) by the CAR's antigen binding domain enables T cell activity or an NK cell (natural killer cell) activity, e.g., effector cytotoxic function, regulatory function, and/or NK target cell killing function.

[0085] Non-limiting examples of assays which can be used to determine T cell or NK activity include cytotoxic activity, cytokine release, expression of activation markers (e.g., CD69, CD25, granulation markers, CD107a), function of Treg (suppression of T cell effector function), and/or function of NK cells (e.g., target cell killing).

[0086] Similar measurements which determine T cell function relate to the functional avidity of CAR-expressing T cell including affinity threshold that enables maximal CD8 and CD4 T effector T cell function.

[0087] It should be noted that the affinity of the antigen binding domain to its antigen can be quantified using known methods. For example, when using Surface Plasmon Resonance (SPR) [described in Scarano S, Mascini M, Turner A P, Minunni M. Surface plasmon resonance imaging for affinity-based biosensors. Biosens Bioelectron. 2010, 25: 957-66, which is fully incorporated herein by reference in its entirety] a soluble molecule such as an antibody [e.g., a TCRL antibody, or a cloned extracellular domain of the αβTCR which is stabilized by various means (e.g., by introducing disulphide bonds, or linkers between the units)] is tested for its binding to the antigen, and the affinity is determined by calculating the K_{D} dissociation constant. It should be noted that a higher K_{D} reflects a lower affinity.

[0088] According to some embodiments of the invention, the affinity of the antigen binding domain to the antigen is characterized by a K_{D} which is higher than about 150 nM, e.g., higher than about 200 nM, e.g., higher than about 250 nM, e.g., higher than about 300 nM, e.g., higher than about 350 nM, e.g., higher than about 400 nM, e.g., higher than about 450 nM, e.g., higher than about 500 nM, e.g., higher than about 550 nM, e.g., higher than about 600 nM, e.g., higher than about 650 nM, e.g., higher than about 700 nM, e.g., higher than about 750 nM, e.g., higher than about 800 nM, e.g., higher than about 850 nM, e.g., higher than about 900 nM, e.g., higher than about 950 nM, e.g., higher than about 1000 nM, e.g., higher than about 1100 nM, e.g., higher than about 1200 nM, e.g., higher than about 1300 nM, e.g., higher than about 1400 nM, e.g., higher than about 1500 nM, e.g., higher than about 2000 nM, e.g., higher than about 2500 nM, e.g., higher than about 3000 nM, e.g., higher than about 3500 nM, e.g., higher than about 4000 nM, e.g., higher than about 4500 nM, e.g., higher than about 4800 nM, e.g., about 5000 nM (i.e., 5 μM).

[0089] According to some embodiments of the invention, the affinity of the antigen binding domain to the antigen is characterized by a K_{D} which is between about 200 nM (nanomolar) to about 5 μM (micromolar), e.g., between about 250 nM to about 5 μM, e.g., between about 300 nM to about 5 μM, e.g., between about 350 nM to about 5 μM, e.g., between about 400 nM to about 5 μM, e.g., between about 450 nM to about 5 μM, e.g., between about 550 nM to about 5 μM, e.g., between about 600 nM to about 5 μM, e.g., between about 650 nM to about 5 μM, e.g., between about 700 nM to about 5 μM, e.g., between about 750 nM to about 5 μM, e.g., between about 800 nM to about 5 μM, e.g., between about 1000 nM to about 5 μM, e.g., between about 1200 nM to about 5 μM, e.g., between about 1400 nM to about 5 μM, e.g., between about 1500 nM to about 5 μM, e.g., between about 2 μM to about 5 μM, e.g., between about 2.5 μM to about 5 μM, e.g., between about 3 μM to about 5 μM, e.g., between about 4 μM to about 5 μM; e.g., between about 200 nM (nanomolar) to about 4.5 μM (micromolar), e.g., between about 250 nM to about 4 μM, e.g., between about 300 nM to about 4 μM, e.g., between about 350 nM to about 4 μM, e.g., between about 400 nM to about 4 μM, e.g., between about 450 nM to about 4 μM, e.g., between about 550 nM to about 4 μM, e.g., between about 600 nM to about 4 μM, e.g., between about 650 nM to about 4 μM, e.g., between about 700 nM to about 4 μM, e.g., between about 750 nM to about 4 μM, e.g., between about 800 nM to about 4 μM, e.g., between about 1000 nM to about 4 μM, e.g., between about 1200 nM to about 4 μM, e.g., between about 1400 nM to about 4 μM, e.g., between about 1500 nM to about 4 μM; e.g., between about 200 nM (nanomolar) to about 3.5 μM (micromolar), e.g., between about 250 nM to about 3 μM, e.g., between about 300 nM to about 3 μM, e.g., between about 350 nM to about 3 μM, e.g., between about 400 nM to about 3 μM, e.g., between about 450 nM to about 3 μM, e.g., between about 550 nM to about 3 μM, e.g., between about 600 nM to about 3 μM, e.g., between about 650 nM to about 3 μM, e.g., between about 700 nM to about 3 μM, e.g., between about 750 nM to about 3 μM, e.g., between about 800 nM to about 3 μM, e.g., between about 1000 nM to about 3 μM, e.g., between about 1200 nM to about 3 μM, e.g., between about 1400 nM to about 3 μM, e.g., between about 1500 nM to about 3 μM; e.g., between about 200 nM (nanomolar) to about 2.5 μM (micromolar), e.g., between about 250 nM to about 2 μM, e.g., between about 300 nM to about 2 μM, e.g., between about 350 nM to about 2 μM, e.g., between about 400 nM to about 2 μM, e.g., between about 450 nM to about 2 μM, e.g., between about 550 nM to about 2 μM, e.g., between about 600 nM to about 2 μM, e.g., between about 650 nM to about 2 μM, e.g., between about 700 nM to about 2 μM, e.g., between about 750 nM to about 2 μM, e.g., between about 800 nM to about 2 μM, e.g., between about 1000 nM to about 2 μM, e.g., between about 1200 nM to about 2 μM, e.g., between about 1400 nM to about 2 μM, e.g., between about 1500 nM to about 2 μM; e.g., between about 200 nM (nanomolar) to about 2.0 μM (micromolar), e.g., between about 250 nM to about 1.5 μM, e.g., between about 300 nM to about 1.5 μM, e.g., between about 350 nM to about 1.5 μM, e.g., between about 400 nM to about 1.5 μM, e.g., between about 450 nM to about 1.5 μM, e.g., between about 550 nM to about 1.5 μM, e.g., between about 600 nM to about 1.5 μM, e.g., between about 650 nM to about 1.5 μM, e.g., between about 700 nM to about 1.5 μM, e.g., between about 750 nM to about 1.5 μM, e.g., between about 800 nM to about 1.5 μM, e.g., between about 1000 nM to about 1.5 μM, e.g., between about 1200 nM to about 1.5 μM, e.g., between about 1400 nM to about 1.5 μM.

[0090] According to some embodiments of the invention, the avidity of a cell (e.g., T cell or NK cells) transduced with the CAR molecule is determined using methods known in the art such as competition assays, titration assays and the like.

[0091] TCR intrinsic affinity is defined as the strength of binding of one TCR molecule to the antigen (e.g., peptide-MHC complex). In contrast, TCR binding avidity defines, in the cellular context, the strength of binding among multiple TCRs to their respective antigen (e.g., peptide-MHC complex) [reviewed in von Essen M R, Kongsbak M, Geisler C. Mechanisms behind functional avidity maturation in T cells. Clin Dev Immunol. 2012; 2012:163453; Stone J D, Chervin A S, Kranz D M. T-cell receptor binding affinities and kinetics: impact on T-cell activity and specificity. Immunology. 2009; 126(2):165-76; Harari, V. Dutoit, C. Cellerai, P. A. Bart, R. A. Du Pasquier, and G. Pantaleo, Functional signatures of protective antiviral T-cell immunity in human virus infections, Immunological Reviews, 2006.211: 236-254; each of which is fully incorporated herein in its entirety].

[0092] According to some embodiments of the invention, the avidity of the cell transduced with the CAR is determined by a peptide titration assay (e.g., detecting the peptide concentration at which there is 50% of Max interferon gamma release from the cell as described in the Examples section which follows, e.g., shown in FIG. 6B)

[0093] According to some embodiments of the invention, the avidity of the cell transduced with the CAR is between about 1 nM about 50 μM as determined by peptide titration assay (e.g., detecting the peptide concentration at which there is 50% of Max interferon gamma release from the cell as described in the Examples section which follows).

[0094] According to some embodiments of the invention, the avidity of the cell transduced with CAR is between about 1 nM to about 100 nM, e.g., between about 1-50 nM, e.g., between about 50-100 nM.

[0095] According to some embodiments of the invention, the avidity of the cell transduced with CAR is between about 100 nM to about 200 nM, e.g., between 50-200 nM.

[0096] According to some embodiments of the invention, the avidity of the cell transduced with CAR is between about 50-500 nM, e.g., between about 200-500 nM, e.g., about 300-500 nM, e.g., about 200-300 nM.

[0097] According to some embodiments of the invention, the avidity of the cell transduced with CAR is between about 500 nM and about 50 μM, e.g., between about 1-10 μM, e.g., between about 3-10 μM, e.g., between about 5-10 μM, e.g., between 10-50 μM, e.g., between about 10-30 μM, e.g., about 40-50 μM, e.g., about 5 μM, e.g., about 10 μM.

[0098] According to some embodiments of the invention, the avidity of the cell transduced with CAR is about 1-10 μM; e.g., about 3-10 μM, e.g., about 5 μM, or about 10 μM.

[0099] For example, an avidity of 5 μM was tested for T cells transduced with the WT1 αβTCR CAR used by the present inventors (FIG. 6B; see results of “TCR” in the upper graph showing interferon gamma release). Similarly, an avidity of 10 μM was tested for T cells transduced with the WT1 TCRL F2 CAR (FIG. 6B; see results of “F2” in the upper graph showing interferon gamma release).

[0100] Any numerical value described herein in the context of the term “about” should be read also in the absence of this term.

[0101] According to some embodiments of the invention, the extracellular domain comprises complementarity determining region (CDR) which are capable of specifically binding the antigen. Such CDRs can be obtained from an antibody.

[0102] The term “antibody” as used in this invention includes intact molecules as well as functional fragments thereof, such as Fab, Fab′, F(ab′)2, Fv, linear antibodies, scFv antibodies, and multispecific antibodies formed from antibody fragments that are capable of binding to the antigen. These functional antibody fragments are defined as follows: (1) Fab, the fragment which contains a monovalent antigen-binding fragment of an antibody molecule, can be produced by digestion of whole antibody with the enzyme papain to yield an intact light chain and a portion of one heavy chain; (2) Fab′, the fragment of an antibody molecule that can be obtained by treating whole antibody with pepsin, followed by reduction, to yield an intact light chain and a portion of the heavy chain; two Fab′ fragments are obtained per antibody molecule; (3) (Fab′)2, the fragment of the antibody that can be obtained by treating whole antibody with the enzyme pepsin without subsequent reduction; F(ab′)2 is a dimer of two Fab′ fragments held together by two disulfide bonds; (4) Fv, defined as a genetically engineered fragment containing the variable region of the light chain and the variable region of the heavy chain expressed as two chains; (5) Single chain antibody (“SCA”), a genetically engineered molecule containing the variable region of the light chain and the variable region of the heavy chain, linked by a suitable polypeptide linker as a genetically fused single chain molecule; (6) CDR peptide is a peptide coding for a single complementarity-determining region (CDR); and (7) Single domain antibodies (also called nanobodies), a genetically engineered single monomeric variable antibody domain which selectively binds to a specific antigen. Nanobodies have a molecular weight of only 12-15 kDa, which is much smaller than a common antibody (150-160 kDa).

[0103] An “antibody heavy chain,” as used herein, refers to the larger of the two types of polypeptide chains present in all antibody molecules in their naturally occurring c

[0104] An “antibody light chain,” as used herein, refers to the smaller of the two types of polypeptide chains present in all antibody molecules in their naturally occurring conformations. .kappa. and .lamda. light chains refer to the two major antibody light chain isotypes.

[0105] By the term “synthetic antibody” as used herein, is meant an antibody which is generated using recombinant DNA technology, such as, for example, an antibody expressed by a bacteriophage as described herein. The term should also be construed to mean an antibody which has been generated by the synthesis of a DNA molecule encoding the antibody and which DNA molecule expresses an antibody protein, or an amino acid sequence specifying the antibody, wherein the DNA or amino acid sequence has been obtained using synthetic DNA or amino acid sequence technology which is available and well known in the art.

[0106] Methods of producing polyclonal and monoclonal antibodies as well as fragments thereof are well known in the art (See for example, Harlow and Lane, Antibodies: A Laboratory Manual, Cold Spring Harbor Laboratory, New York, 1988, incorporated herein by reference).

[0107] Antibody fragments according to the present invention can be prepared by proteolytic hydrolysis of the antibody or by expression in E. coli or mammalian cells (e.g. Chinese hamster ovary cell culture or other protein expression systems) of DNA encoding the fragment. Antibody fragments can be obtained by pepsin or papain digestion of whole antibodies by conventional methods. For example, antibody fragments can be produced by enzymatic cleavage of antibodies with pepsin to provide a 5S fragment denoted F(ab′)2. This fragment can be further cleaved using a thiol reducing agent, and optionally a blocking group for the sulfhydryl groups resulting from cleavage of disulfide linkages, to produce 3.5S Fab′ monovalent fragments. Alternatively, an enzymatic cleavage using pepsin produces two monovalent Fab′ fragments and an Fc fragment directly. These methods are described, for example, by Goldenberg, U.S. Pat. Nos. 4,036,945 and 4,331,647, and references contained therein, which patents are hereby incorporated by reference in their entirety. See also Porter, R. R. [Biochem. J. 73: 119-126 (1959)]. Other methods of cleaving antibodies, such as separation of heavy chains to form monovalent light-heavy chain fragments, further cleavage of fragments, or other enzymatic, chemical, or genetic techniques may also be used, so long as the fragments bind to the antigen that is recognized by the intact antibody.

[0108] Fv fragments comprise an association of VH and VL chains. This association may be noncovalent, as described in Inbar et al. [Proc. Nat'l Acad. Sci. USA 69:2659-62 (19720]. Alternatively, the variable chains can be linked by an intermolecular disulfide bond or cross-linked by chemicals such as glutaraldehyde. Preferably, the Fv fragments comprise VH and VL chains connected by a peptide linker. These single-chain antigen binding proteins (sFv) are prepared by constructing a structural gene comprising DNA sequences encoding the VH and VL domains connected by an oligonucleotide. The structural gene is inserted into an expression vector, which is subsequently introduced into a host cell such as E. coli. The recombinant host cells synthesize a single polypeptide chain with a linker peptide bridging the two V domains. Methods for producing sFvs are described, for example, by [Whitlow and Filpula, Methods 2: 97-105 (1991); Bird et al., Science 242:423-426 (1988); Pack et al., Bio/Technology 11:1271-77 (1993); and U.S. Pat. No. 4,946,778, which is hereby incorporated by reference in its entirety.

[0109] CDR peptides (“minimal recognition units”) can be obtained by constructing genes encoding the CDR of an antibody of interest. Such genes are prepared, for example, by using the polymerase chain reaction to synthesize the variable region from RNA of antibody-producing cells. See, for example, Larrick and Fry [Methods, 2: 106-10 (1991)].

[0110] Once the CDRs of an antibody are identified, using conventional genetic engineering techniques, expressible polynucleotides encoding any of the forms or fragments of antibodies described herein can be synthesized and modified in one of many ways in order to produce a spectrum of related-products.

[0111] According to some embodiments of the invention, the CDRs are derived from αβ T cell receptor (TCR) which specifically binds to the antigen.

[0112] According to some embodiments of the invention, the CDRs are derived from an engineered affinity-enhanced αβ T cell receptor (TCR) which specifically binds to the antigen, with a binding affinity characterized by a KD which is at least 150 nM.

[0113] According to some embodiments of the invention, the CDRs are derived from an engineered αβ T cell receptor (TCR) with improved stability or any other biophysical property.

[0114] According to some embodiments of the invention, the CDRs are derived from a T cell receptor-like (TCRLs) antibody which specifically binds to the antigen. Examples of TCRLs and methods of generating same are described in WO03/068201, WO2008/120203, WO2012/007950, WO2009125395, WO2009/125394, each of which is fully incorporated herein by their entirety.

[0115] According to some embodiments of the invention, the antigen binding domain comprises a single chain Fv (scFv) molecule.

[0116] According to some embodiments of the invention, the antigen binding domain comprises complementarity determining region (CDR) which specifically bind to the HLA-A2-WT1_{Db126} complexes.

[0117] According to some embodiments of the invention, the antigen binding domain comprises the complementarity determining region (CDR) of the F2 VL (SEQ ID NO:16; encoded by SEQ ID NO:18) and F2 VH (SEQ ID NO: 17; encoded by SEQ ID NO: 19) TCRL antibody.

[0118] According to some embodiments of the invention, the antigen binding domain of the CAR molecule binds a major histocompatibility complex (MHC) restricted antigen.

[0119] As used herein the phrase “major histocompatibility complex (MHC)” refers to a complex of antigens encoded by a group of linked loci, which are collectively termed H-2 in the mouse and human leukocyte antigen (HLA) in humans. The two principal classes of the MHC antigens, class I and class II, each comprise a set of cell surface glycoproteins which play a role in determining tissue type and transplant compatibility. In transplantation reactions, cytotoxic T-cells (CTLs) respond mainly against foreign class I glycoproteins, while helper T-cells respond mainly against foreign class II glycoproteins.

[0120] Major histocompatibility complex (MHC) class I molecules are expressed on the surface of nearly all cells. These molecules function in presenting peptides which are mainly derived from endogenously synthesized proteins to CD8+ T cells via an interaction with the αβ T-cell receptor. The class I MHC molecule is a heterodimer composed of a 46-kDa heavy chain which is non-covalently associated with the 12-kDa light chain β-2 microglobulin. In humans, there are several MHC haplotypes, such as, for example, HLA-A2, HLA-A1, HLA-A3, HLA-A24, HLA-A28, HLA-A31, HLA-A33, HLA-A34, HLA-B7, HLA-B45 and HLA-Cw8, their sequences can be found at the kabbat data base, at htexttransferprotocol://immuno.bme.nwu.edu. Further information concerning MHC haplotypes can be found in Paul, B. Fundamental Immunology Lippincott-Rven Press.

[0121] As used herein the term “peptide” refers to native peptides (either proteolysis products or synthetically synthesized peptides) and further to peptidomimetics, such as peptoids and semipeptoids which are peptide analogs, which may have, for example, modifications rendering the peptides more stable while in a body, or more immunogenic. Such modifications include, but are not limited to, cyclization, N terminus modification, C terminus modification, peptide bond modification, including, but not limited to, CH₂—NH, CH₂—S, CH₂—S═O, O═C—NH, CH₂—O, CH₂—CH₂, S═C—NH, CH═CH or CF═CH, backbone modification and residue modification. Methods for preparing peptidomimetic compounds are well known in the art and are specified in Quantitative Drug Design, C. A. Ramsden Gd., Chapter 17.2, F. Choplin Pergamon Press (1992), which is incorporated by reference as if fully set forth herein. Further details in this respect are provided hereinunder.

[0122] Peptide bonds (—CO—NH—) within the peptide may be substituted, for example, by N-methylated bonds (—N(CH3)-CO—), ester bonds (—C(R)H—C—O—O—C(R)—N—), ketomethylen bonds (—CO—CH2-), α-aza bonds (—NH—N(R)—CO—), wherein R is any alkyl, e.g., methyl, carba bonds (—CH2-NH—), hydroxyethylene bonds (—CH(OH)—CH2-), thioamide bonds (—CS—NH—), olefinic double bonds (—CH═CH—), retro amide bonds (—NH—CO—), peptide derivatives (—N(R)—CH2-CO—), wherein R is the “normal” side chain, naturally presented on the carbon atom.

[0123] These modifications can occur at any of the bonds along the peptide chain and even at several (2-3) at the same time. According to some embodiments of the invention, but not in all cases necessary, these modifications should exclude anchor amino acids.

[0124] Natural aromatic amino acids, Trp, Tyr and Phe, may be substituted for synthetic non-natural acid such as TIC, naphthylelanine (Nol), ring-methylated derivatives of Phe, halogenated derivatives of Phe or o-methyl-Tyr.

[0125] In addition to the above, the peptides of the invention may also include one or more modified amino acids or one or more non-amino acid monomers (e.g. fatty acids, complex carbohydrates etc).

[0126] As used herein in the specification and in the claims section below the term “amino acid” is understood to include the 20 naturally occurring amino acids; those amino acids often modified post-translationally in vivo, including for example hydroxyproline, phosphoserine and phosphothreonine; and other unusual amino acids including, but not limited to, 2-aminoadipic acid, hydroxylysine, isodesmosine, nor-valine, nor-leucine and ornithine. Furthermore, the term “amino acid” includes both D- and L-amino acids. Further elaboration of the possible amino acids usable according to the present invention and examples of non-natural amino acids useful in MHC-I HLA-A2 recognizable peptide antigens are given herein under.

[0127] The peptides of the invention are preferably utilized in a linear form, although it will be appreciated that in cases where cyclicization does not severely interfere with peptide characteristics, cyclic forms of the peptide can also be utilized.

[0128] The peptides of the invention may include one or more non-natural or natural polar amino acids, including but not limited to serine and threonine which are capable of increasing peptide solubility due to their hydroxyl-containing side chain.

[0129] The peptides of the invention may be synthesized by any techniques that are known to those skilled in the art of peptide synthesis. For solid phase peptide synthesis, a summary of the many techniques may be found in J. M. Stewart and J. D. Young, Solid Phase Peptide Synthesis, W. H. Freeman Co. (San Francisco), 1963 and J. Meienhofer, Hormonal Proteins and Peptides, vol. 2, p. 46, Academic Press (New York), 1973. For classical solution synthesis see G. Schroder and K. Lupke, The Peptides, vol. 1, Academic Press (New York), 1965. Large scale peptide synthesis is described by Andersson Biopolymers 2000; 55(3):227-50.

[0130] Based on accumulated experimental data, it is nowadays possible to predict which of the peptides of a protein will bind to MHC, class I. The HLA-A2 MHC class I has been so far characterized better than other HLA haplotypes, yet predictive and/or sporadic data is available for all other haplotypes.

[0131] With respect to HLA-A2 binding peptides, assume the following positions (P1-P9) in a 9-mer peptide:

[0132] P1-P2-P3-P4-P5-P6-P7-P8-P9

[0133] The P2 and P2 positions include the anchor residues which are the main residues participating in binding to MHC molecules. Amino acid resides engaging positions P2 and P9 are hydrophilic aliphatic non-charged natural amino (examples being Ala, Val, Leu, Ile, Gln, Thr, Ser, Cys, preferably Val and Leu) or of a non-natural hydrophilic aliphatic non-charged amino acid (examples being norleucine (Nle), norvaline (Nva), α-aminobutyric acid). Positions P1 and P3 are also known to include amino acid residues which participate or assist in binding to MHC molecules, however, these positions can include any amino acids, natural or non-natural. The other positions are engaged by amino acid residues which typically do not participate in binding, rather these amino acids are presented to the immune cells. Further details relating to the binding of peptides to MHC molecules can be found in Parker, K. C., Bednarek, M. A., Coligan, J. E., Scheme for ranking potential HLA-A2 binding peptides based on independent binding of individual peptide side-chains. J Immunol. 152,163-175, 1994., see Table V, in particular. Hence, scoring of HLA-A2.1 binding peptides can be performed using the HLA Peptide Binding Predictions software approachable through a worldwide web interface at hypertexttransferprotocol://worldwideweb.bimas.dcrt.nih.gov/molbio/hla_bind/index. This software is based on accumulated data and scores every possible peptide in an analyzed protein for possible binding to MHC HLA-A2.1 according to the contribution of every amino acid in the peptide. Theoretical binding scores represent calculated half-life of the HLA-A2.1-peptide complex.

[0134] Hydrophilic aliphatic natural amino acids at P2 and P9 can be substituted by synthetic amino acids, preferably Nleu, Nval and/or α-aminobutyric acid. P9 can be also substituted by aliphatic amino acids of the general formula —HN(CH₂)ₙCOOH, wherein n=3-5, as well as by branched derivatives thereof, such as, but not limited to,

[chemical structure]

wherein R is, for example, methyl, ethyl or propyl, located at any one or more of the n carbons.

[0135] The amino terminal residue (position P1) can be substituted by positively charged aliphatic carboxylic acids, such as, but not limited to, H₂N(CH₂)ₙCOOH, wherein n=2-4 and H₂N—C(NH)—NH(CH₂)ₙCOOH, wherein n=2-3, as well as by hydroxy Lysine, N-methyl Lysine or ornithine (Orn). Additionally, the amino terminal residue can be substituted by enlarged aromatic residues, such as, but not limited to, H₂N—(C₆H₆)—CH₂—COOH, p-aminophenyl alanine, H₂N—F(NH)—NH—(C₆H₆)—CH₂—COOH, p-guanidinophenyl alanine or pyridinoalanine (Pal). These latter residues may form hydrogen bonding with the OH⁻ moieties of the Tyrosine residues at the MHC-1 N-terminal binding pocket, as well as to create, at the same time aromatic-aromatic interactions.

[0136] Derivatization of amino acid residues at positions P4-P8, should these residues have a side-chain, such as, OH, SH or NH₂, like Ser, Tyr, Lys, Cys or Orn, can be by alkyl, aryl, alkanoyl or aroyl. In addition, OH groups at these positions may also be derivatized by phosphorylation and/or glycosylation. These derivatizations have been shown in some cases to enhance the binding to the T cell receptor.

[0137] Longer derivatives in which the second anchor amino acid is at position P10 may include at P9 most L amino acids. In some cases shorter derivatives are also applicable, in which the C terminal acid serves as the second anchor residue.

[0138] Cyclic amino acid derivatives can engage position P4-P8, preferably positions P6 and P7. Cyclization can be obtained through amide bond formation, e.g., by incorporating Glu, Asp, Lys, Orn, di-amino butyric (Dab) acid, di-aminopropionic (Dap) acid at various positions in the chain (—CO—NH or —NH—CO bonds). Backbone to backbone cyclization can also be obtained through incorporation of modified amino acids of the formulas H—N((CH₂)ₙ—COOH)—C(R)H—COOH or H—N((CH₂)ₙ—COOH)—C(R)H—NH₂, wherein n=1-4, and further wherein R is any natural or non-natural side chain of an amino acid.

[0139] Cyclization via formation of S—S bonds through incorporation of two Cys residues is also possible. Additional side-chain to side chain cyclization can be obtained via formation of an interaction bond of the formula —(—CH₂—)ₙ—S—CH₂—C—, wherein n=1 or 2, which is possible, for example, through incorporation of Cys or homoCys and reaction of its free SH group with, e.g., bromoacetylated Lys, Orn, Dab or Dap.

[0140] Peptide bonds (—CO—NH—) within the peptide may be substituted by N-methylated bonds (—N(CH₃)—CO—), ester bonds (—C(R)H—C—O—O—C(R)—N—), ketomethylen bonds (—CO—CH₂—), α-aza bonds (—NH—N(R)—CO—), wherein R is any alkyl, e.g., methyl, carba bonds (—CH₂—NH—), hydroxyethylene bonds (—CH(OH)—CH₂—), thioamide bonds (—CS—NH—), olefinic double bonds (—CH═CH—), retro amide bonds (—NH—CO—), peptide derivatives (—N(R)—CH₂—CO—), wherein R is the “normal” side chain, naturally presented on the carbon atom.

[0141] These modifications can occur at any of the bonds along the peptide chain and even at several (2-3) at the same time. Preferably, but not in all cases necessary, these modifications should exclude anchor amino acids.

[0142] Natural aromatic amino acids, Trp, Tyr and Phe, may be substituted for synthetic non-natural acid such as TIC, naphthylelanine (Nol), ring-methylated derivatives of Phe, halogenated derivatives of Phe or o-methyl-Tyr.

[0143] As used herein the phrase “tumor antigen” refers to an antigen that is common to specific hyperproliferative disorders such as cancer. Tumor antigens are proteins that are produced by tumor cells that elicit an immune response, particularly T-cell mediated immune responses. The selection of the antigen binding moiety of the invention will depend on the particular type of cancer to be treated.

[0144] The type of tumor antigen referred to in the invention includes a tumor-specific antigen (TSA) or a tumor-associated antigen (TAA). A “TSA” is unique to tumor cells and does not occur on other cells in the body. A “TAA” is not unique to a tumor cell and instead is also expressed on a normal cell under conditions that fail to induce a state of immunologic tolerance to the antigen. The expression of the antigen on the tumor may occur under conditions that enable the immune system to respond to the antigen. TAAs may be antigens that are expressed on normal cells during fetal development when the immune system is immature and unable to respond or they may be antigens that are normally present at extremely low levels on normal cells but which are expressed at much higher levels on tumor cells.

[0145] The antigens discussed herein are merely included by way of example. The list is not intended to be exclusive and further examples will be readily apparent to those of skill in the art.

[0146] Tumor antigens are well known in the art and include, for example, a glioma-associated antigen, carcinoembryonic antigen (CEA), β-human chorionic gonadotropin, alphafetoprotein (AFP), lectin-reactive AFP, thyroglobulin, RAGE-1, MN-CA IX, human telomerase reverse transcriptase, RU1, RU2 (AS), intestinal carboxyl esterase, mut hsp70-2, M-CSF, prostase, prostate-specific antigen (PSA), PAP, NY-ESO-1, LAGE-1a, p53, prostein, PSMA, Her2/neu, survivin and telomerase, prostate-carcinoma tumor antigen-1 (PCTA-1), MAGE, ELF2M, neutrophil elastase, ephrinB2, CD22, insulin growth factor (IGF)-I, IGF-II, IGF-I receptor and mesothelin. These molecules include but are not limited to tissue-specific antigens such as MART-1, tyrosinase and GP 100 in melanoma and prostatic acid phosphatase (PAP) and prostate-specific antigen (PSA) in prostate cancer. Other target molecules belong to the group of transformation-related molecules such as the oncogene HER-2/Neu/ErbB-2. Yet another group of target antigens are onco-fetal antigens such as carcinoembryonic antigen (CEA). In B-cell lymphoma the tumor-specific idiotype immunoglobulin constitutes a truly tumor-specific immunoglobulin antigen that is unique to the individual tumor. B-cell differentiation antigens such as CD19, CD20 and CD37 are other candidates for target antigens in B-cell lymphoma. Some of these antigens (CEA, HER-2, CD19, CD20, idiotype) have been used as targets for passive immunotherapy with monoclonal antibodies with limited success.

[0147] Non-limiting examples of TSA or TAA antigens include the following: Differentiation antigens such as MART-1/MelanA (MART-1), gp100 (Pmel 17), tyrosinase, TRP-1, TRP-2 and tumor-specific multilineage antigens such as MAGE-1, MAGE-3, BAGE, GAGE-1, GAGE-2, p15; overexpressed embryonic antigens such as CEA; overexpressed oncogenes and mutated tumor-suppressor genes such as p53, Ras, HER-2/neu; unique tumor antigens resulting from chromosomal translocations; such as BCR-ABL, E2A-PRL, H4-RET, IGH-IGK, MYL-RAR; and viral antigens, such as the Epstein Barr virus antigens EBVA and the human papillomavirus (HPV) antigens E6 and E7. Other large, protein-based antigens include TSP-180, MAGE-4, MAGE-5, MAGE-6, RAGE, NY-ESO, p185erbB2, p180erbB-3, c-met, nm-23H1, PSA, TAG-72, CA 19-9, CA 72-4, CAM 17.1, NuMa, K-ras, beta-Catenin, CDK4, Mum-1, p 15, p 16, 43-9F, 5T4, 791Tgp72, alpha-fetoprotein, beta-HCG, BCA225, BTAA, CA 125, CA 15-3\CA 27.291\BCAA, CA 195, CA 242, CA-50, CAM43, CD68\P1, CO-029, FGF-5, G250, Ga733\EpCAM, HTgp-175, M344, MA-50, MG7-Ag, MOV18, NB/70K, NY-CO-1, RCAS1, SDCCAG16, TA-90\Mac-2 binding protein\cyclophilin C-associated protein, TAAL6, TAG72, TLP, and TPS.

[0148] In a preferred embodiment, the antigen binding moiety portion of the CAR targets an antigen that includes but is not limited to CD19, CD20, CD22, ROR1, Mesothelin, CD33/IL3Ra, c-Met, PSMA, Glycolipid F77, EGFRvIII, GD-2, MY-ESO-1 TCR, MAGE A3 TCR, and the like.

[0149] Following are non-limiting sequences of HLA class I-restricted tumor antigens which can bind to the antigen binding domain of the CAR molecule of the invention.

TABLE 1

| | | | SEQ ID | |
|---|---|---|---|---|
| | | | NO: of | |
| | | | the | |
| | | GenBank Accession No. of the tumor | tumor | |
| Cancer | TAA/Marker | antigens | antigens | HLA |
| Transitional | Uroplakin II | NP_006751.1 | 94 | HLA- |
| cell | (UPKII) | | | A2 |
| carcinoma | | | | |
| Transitional | Uroplakin Ia | NP_001268372.1; NP_008931.1 | 95, 96 | HLA- |
| cell | (UPK1A) | | | A2 |
| carcinoma | | | | |
| Carcinoma of | prostate | AAO16090.1 | 97 | HLA- |
| the | specific | | | A2 |
| prostate | antigen | | | |
| | (NPSA) | | | |
| Carcinoma of | prostate | NP_005663.2 | 98 | HLA- |
| the | specific | | | A2 |
| prostate | membrane | | | |
| | antigen | | | |
| | (PSCA) | | | |
| Carcinoma of | prostate acid | NP_001090.2; NP_001127666.1; | 99-101 | HLA- |
| the | phosphatase | NP_001278966.1 | | A2 |
| prostate | (ACPP) | | | |
| Breast cancer | BA-46 | NP_001108086.1; NP_005919.2; | 102-103 | HLA- |
| | MFGE8 milk | | | A2 |
| | fat globule- | | | |
| | EGF factor 8 | | | |
| | protein | | | |
| | [lactadherin] | | | |
| Breast cancer | Mucin 1 | NP_001018016.1; NP_001018017.1; | 104-123 | HLA- |
| | (MUC1) | NP_001037855.1; NP_001037856.1; | | A2 |
| | | NP_001037857.1; NP_001037858.1; | | |
| | | NP_001191214.1; NP_001191215.1; | | |
| | | NP_001191216.1; NP_001191217.1; | | |
| | | NP_001191218.1; NP_001191219.1; | | |
| | | NP_001191220.1; NP_001191221.1; | | |
| | | NP_001191222.1; NP_001191223.1; | | |
| | | NP_001191224.1; NP_001191225.1; | | |
| | | NP_001191226.1; NP_002447.4 | | |
| Melanoma | premelanosome | NP_001186982.1; NP_001186983.1; | 124-126 | HLA- |
| | protein | NP_008859.1 | | A2 |
| | (PMEL; also | | | |
| | known as | | | |
| | Gp100) | | | |
| Melanoma | melan-A | NP_005502.1; | 127 | HLA- |
| | (MLANA; | | | A2 |
| | also known as | | | |
| | MART1) | | | |
| All tumors | telomerase | NP_001180305.1; NP_937983.2 | 128-129 | HLA- |
| | reverse | | | A2 |
| | transcriptase | | | |
| | (TERT) | | | |
| Leukemia and | TAX | NP_057864.1; YP_002455788.1 | 130-131 | HLA- |
| Burkitts | tax p40 | | | A2 |
| Lymphoma | [Human T- | | | |
| | lymphotropic | | | |
| | virus 1] and | | | |
| | Tax [Human | | | |
| | T- | | | |
| | lymphotropic | | | |
| | virus 4]; | | | |
| Carcinomas | NY-ESO | NP_001318.1 | 132 | HLA- |
| | cancer/testis | | | A2 |
| | antigen 1B | | | |
| | (CTAG1B) | | | |
| Melanoma | Melanoma | NP_004979.3 | 133 | HLA- |
| | antigen family | | | A2 |
| | A1 | | | |
| | (MAGEA1) | | | |
| Melanoma | Melanoma | NP_005353.1 | 134 | HLA- |
| | antigen family | | | A24 |
| | A3 | | | |
| | (MAGEA3, | | | |
| | MAGE-A3) | | | |
| Carcinomas | HER2; erb-b2 | NP_001005862.1; NP_001276865.1; | 135-139 | HLA- |
| | receptor | NP_001276866.1; NP_001276867.1; | | A2 |
| | tyrosine kinase | NP_004439.2; | | |
| | 2 (ERBB2) | | | |
| Melanoma | Beta-catenine; | NP_001091679.1; NP_001091680.1; | 140-142 | HLA- |
| | catenin | NP_001895.1; | | A24 |
| | (cadherin- | | | |
| | associated | | | |
| | protein), beta | | | |
| | 1, 88 kDa | | | |
| | (CTNNB1) | | | |
| Melanoma | Tyrosinase | NP_000363.1 | 143 | HLA- |
| | (TYR) | | | DRB1 |
| Leukemia | Bcr-abl | AAA35594.1 | 144 | HLA- |
| | | | | A2 |
| Head and | caspase 8, | NP_001073593.1; NP_001073594.1; | 145-150 | HLA- |
| neck | apoptosis- | NP_001219.2; NP_203519.1; | | B35 |
| | related | NP_203520.1; NP_203522.1 | | |
| | cysteine | | | |
| | peptidase | | | |
| | (CASP8) | | | |

Table 1.

[0150] According to some embodiments of the invention, the tumor associated antigen comprises the WT1 protein.

[0151] According to some embodiments of the invention, the MHC-restricted tumor associated antigen is the WT1_{Db126} peptide set forth in SEQ ID NO:1.

According to some embodiments of the invention, the tumor associated antigen comprises the tyrosinase protein.

[0152] Tyrosinase peptides that bind to class I MHC molecules (also referred to herein interchangeably as HLA-restricted tyrosinase epitopes, HLA-restricted tyrosinase epitopes and MHC-restricted tyrosinase antigens) are derived from the tyrosinase enzyme (Genebank Accession No: NP_000363.1, SEQ ID NO:143) and are typically 8-10 amino acids long, bind to the heavy chain α1-α2 groove via two or three anchor residues that interact with corresponding binding pockets in the MHC molecule.

[0153] Tyrosinase is a membrane-associated N-linked glycoprotein and it is the key enzyme in melanin synthesis. It is expressed in all healthy melanocytes and in nearly all melanoma tumor samples (H. Takeuchi, et al., 2003; S. Reinke, et al., 2005). Peptides derived from this enzyme are presented on MHC class I molecules and are recognized by autologuos cytolytic T lymphocytes in melanoma patients [T. Wolfel, et al., 1994; Brichard, et al., 1993; Renkvist et al, Cancer immunology immunotherapy 2001 50:3-15; Novellino L, et al., March 2004 update. Cancer Immunol Immunother. 54:187-207, 2005]. Additional tumor tyrosinase HLA-restricted peptides derived from tumor associated antigens (TAA) can be found at the website of the Istituto Nazionale per lo Studio e la Cura dei Tumori at hypertexttransferprotocol://worldwideweb.istitutotumori.mi.it.

[0154] Non-limiting examples of MHC class I restricted tyrosinase antigenic peptides are provided in WO2008/120202, which is fully incorporated herein by reference in its entirety, e.g., in Table 139 of WO2008/120202.

According to some embodiments of the invention, the tyrosinase antigenic peptide is the Tyrosinase₃₆₉₋₃₇₇ peptide [YMDGTMSQV; SEQ ID NO:8].

[0155] According to some embodiments of the invention, the MART-1 antigenic peptide is the peptide set forth by SEQ ID NO:9 (EAAGIGILTV).

[0156] Depending on the desired antigen to be targeted, the CAR molecule of the invention can be engineered to include the appropriate antigen bind moiety that is specific to the desired antigen target.

[0157] For example, if WT1 is the desired antigen that is to be targeted, an antibody for a complex between MHC and WT1_{Db126} peptide (SEQ ID NO:1) can be used as the antigen bind moiety for incorporation into the CAR of the invention.

For example, if tyrosinase is the desired antigen that is to be targeted, an antibody for a complex between MHC and Tyrosinase₃₆₉₋₃₇₇ peptide [YMDGTMSQV; SEQ ID NO:8] can be used as the antigen bind moiety for incorporation into the CAR of the invention.

[0158] Following are non-limiting sequences of HLA class I-restricted viral antigens which can bind to the antigen binding domain of the CAR molecule of the invention (Table 2 below).

[0159] According to some embodiments of the invention, the viral antigens include viral epitopes from a polypeptide selected from the group consisting of: human T cell lymphotropic virus type I (HTLV-1) transcription factor (TAX), influenza matrix protein epitope, Epstein-Bar virus (EBV)-derived epitope, HIV-1 RT, HIV Gag, HIV Pol, influenza membrane protein M1, influenza hemagglutinin, influenza neuraminidase, influenza nucleoprotein, influenza nucleoprotein, influenza matrix protein (M1), influenza ion channel (M2), influenza non-structural protein NS-1, influenza non-structural protein NS-2, influenza PA, influenza PB1, influenza PB2, influenza BM2 protein, influenza NB protein, influenza nucleocapsid protein, Cytomegalovirus (CMV) phosphorylated matrix protein (pp65), TAX, hepatitis C virus (HCV), HBV pre-S protein 85-66, HTLV-1 tax 11-19, HBV surface antigen 185-194.

TABLE 2

| | | GenBank | | |
|---|---|---|---|---|
| | | Accession Nos. | | |
| | | of the viral | SEQ ID NOs: of | |
| | | antigens; or the | the viral | |
| Disease | Viral antigen | peptide sequence | antigens | HLA |
| AIDS (HTLV-1) | HIV-1 RT 476-484 | | | HLA-A2 |
| Gag (HIV) | Gag 77-85 | SLYNTVATL | 230 | |
| Pol (HIV) | Pol 476-484 | ILEPVHGV | 231 | |
| Influenza | | GILGFVFTL | 232 | HLA-A2 |
| Influenza | Membrane | YP_308854.1 | 233 | |
| | protein M1 of | | | |
| | influenza A virus | | | |
| | A/Korea/426/68 | | | |
| | (H2N2) | | | |
| Influenza | hemagglutinin of | NP_056660.1; | 234-235 | |
| | influenza B | YP_308839.1 | | |
| | virus; | | | |
| | hemagglutinin of | | | |
| | influenza A virus | | | |
| | (A/New | | | |
| | York/392/2004 | | | |
| | (H3N2) | | | |
| Influenza | neuraminidase of | NP_056663.1 | 236 | |
| | influenza B virus | | | |
| Influenza | nucleoprotein of | YP_089656.1 | 237 | |
| | influenza C | | | |
| | virus; | | | |
| Influenza | nucleoprotein of | YP_308871.1; | 238-239 | |
| | influenza A virus | YP_581749.1; | | |
| | such as the | | | |
| | A/Korea/426/68 | | | |
| | (H2N2) strain; or | | | |
| | the A/Hong | | | |
| | Kong/1073/99 (H9N2) | | | |
| | strain | | | |
| Influenza | nucleoprotein of | NP_056661.1; | 240 | |
| | influenza B virus | | | |
| Influenza | matrix protein | NP_056664.1 | 241 | |
| | (M1) of | | | |
| | influenza B virus | | | |
| Influenza | ion channel (M2) | NP_040979.2 | 242 | |
| | of influenza A | | | |
| | virus A/Puerto | | | |
| | Rico/8/34 (H1N1) | | | |
| | strain | | | |
| Influenza | non-structural | NP_056666.1 | 243 | |
| | protein NS-1 of | | | |
| | influenza B virus | | | |
| Influenza | non-structural | NP_056665.1 | 244 | |
| | protein NS-2 of | | | |
| | influenza B virus | | | |
| Influenza | PA of influenza | AAL60433 | 245 | |
| | A virus | | | |
| | A/Charlottesville/ | | | |
| | 28/95 (H1N1) | | | |
| Influenza | PB1 of | NP_056657.1 | 246 | |
| | influenza B virus | | | |
| Influenza | PB2 of influenza | NP_040987.1 | 247 | |
| | A virus | | | |
| | (A/Puerto | | | |
| | Rico/8/34 (H1N1) | | | |
| Influenza | BM2 protein of | YP_419283.1 | 248 | |
| | influenza B virus | | | |
| Influenza | NB protein of | NP_056662.1 | 249 | |
| | influenza B virus | | | |
| Influenza | nucleocapsid | NP_040982.1 | 250 | |
| | protein of | | | |
| | influenza A virus | | | |
| | A/Puerto | | | |
| | Rico/8/34 (H1N1) | | | |
| CMV disease | CMV | AAA45996; | 10; 11; 251; 252 | HLA-A2 |
| | phosphorylated | P06725; | | |
| | matrix protein | AAA45994.1; | | |
| | (pp65) [Human | P18139 | | |
| | herpesvirus 5] | | | |
| Leukemia and | TAX | NP_057864.1; | 130-131 | HLA-A2 |
| Burkitts | tax p40 [Human | YP_002455788.1 | | |
| Lymphoma | T-lymphotropic | | | |
| | virus 1] and | | | |
| | Tax [Human T- | | | |
| | lymphotropic | | | |
| | virus 4]; | | | |
| Hepatitis C | HCV | | | HLA-A2 |
| Hepatitis B | HBV pre-S | STNRQSGRQ | 253 | HLA-A2 |
| | protein | | | |
| | 85-66 | | | |
| HTLV-1 | HTLV-1 tax 11-19 | LLFGYPVYV | 254 | HLA-A2 |
| Leukemia | | | | |
| Hepatitis | HBV surface | GLSPTVWLSV | 255 | HLA-A2 |
| | antigen 185-194 | | | |

[0160] Cytomegalovirus (CMV) belongs to the human herpesviruses. There are several known strains of CMV, including strains 1042, 119, 2387, 4654, 5035, 5040, 5160, 5508, AD169, Eisenhardt, Merlin, PT, Toledo and Towne. During viral infection, the expressed viral proteins, e.g., pp65 of the CMV AD169 strain [GenBank Accession No. AAA45996.1 (SEQ ID NO:10); or GenBank Accession No. P06725 (SEQ ID NO:11)] pp64 of the CMV Towne strain [GenBank Accession No. AAA45994.1 for amino acids (SEQ ID NO:251); or GenBank Accession No. P18139 (SEQ ID NO:252)] are subject to proteasomal degradation and the MHC-restricted peptides bind to the MHC molecules [e.g., MHC class I or MHC class II] and are further presented therewith on the cell surface. The pp65 (561 amino acids in length) and pp64 (551 amino acids in length) proteins of the CMV AD169 and Towne strains, respectively, are 99% identical proteins and share the same amino acid sequence from position 3-551 of pp64 and 13-561 of pp65.

[0161] According to some embodiments of the invention, the MHC-restricted CMV antigenic peptide is the antigenic peptide derived from the pp65 or pp64 proteins and described in Table 137 of WO2008/120203, which is fully incorporated herein by reference in its entirety.

[0162] According to some embodiments of the invention, the MHC restricted antigen comprises an MHC class II restricted antigen.

[0163] MHC class II molecules are expressed in professional antigen presenting cells (APCs) such as macrophages, dendritic cells and B cells. Each MHC class II molecule is a heterodimer composed of two homologous subunits, alpha chain (with α1 and α2 extracellular domains, transmembrane domain and short cytoplasmic tail) and beta chain (with β1 and β2 extracellular domains, transmembrane domain and short cytoplasmic tail). Peptides, which are derived from extracellular proteins, enter the cells via endocytosis, are digested in the lysosomes and further bind to MHC class II molecules for presentation on the membrane.

[0164] Various MHC class II molecules are found in humans. Examples include, but are not limited to HLA-DM, HLA-DO, HLA-DP, HLA-DQ (e.g., DQ2, DQ4, DQ5, DQ6, DQ7, DQ8, DQ9), HLA-DR (e.g., DR1, DR2, DR3, DR4, DR5, DR7, DR8, DR9, DR10, DR11, DR12, DR13, DR14, DR15, and DR16).

[0165] Non-limiting examples of DQ A1 alleles include 0501, 0201, 0302, 0301, 0401, 0101, 0102, 0104, 0102, 0103, 0104, 0103, 0102, 0303, 0505 and 0601.

[0166] Non-limiting examples of DQ B1 alleles include 0201, 0202, 0402, 0501, 0502, 0503, 0504, 0601, 0602, 0603, 0604, 0609, 0301, 0304, 0302 and 0303.

[0167] Non-limiting examples of DPA1 alleles include 01, e.g., 0103, 0104, 0105, 0106, 0107, 0108, 0109; 02, e.g., 0201, 0202, 0203; 03 e.g., 0301, 0302, 0303, 0401.

[0168] Non-limiting examples of DPB1 alleles include 01, e.g., 0101, 0102; 02 e.g., 0201, 0202, 0203; 03; 04, e.g., 0401, 0402, 0403; 05, e.g., 0501, 0502; 06; 08, e.g., 0801, 0802; 09, e.g., 0901, 0902; 10, e.g., 1001, 1002; 11 e.g., 1101, 1102; 13, e.g., 1301, 1302; 14, e.g., 1401, 1402; 15, e.g., 1501, 1502; 16, e.g., 1601, 1602; 17, e.g., 1701, 1702; 18, e.g., 1801, 1802; 19, e.g., 1901, 1902; 20, e.g., 2001, 2002; 21; 22; 23; 24; 25; 26, e.g., 2601, 2602; and 27.

[0169] Non-limiting examples of DP haplotypes include HLA-DPA1*0103/DPB1*0401 (DP401); and HLA-DPA1*0103/DPB1*0402 (DP402).

[0170] Non-limiting examples of DR B1 alleles include 0101, 0102, 0103, 0301, 0401, 0407, 0402, 0403, 0404, 0405, 0701, 0701, 0801, 0803, 0901, 1001, 1101, 1103, 1104, 1201, 1301, 1302, 1302, 1303, 1401, 1501, 1502, 1601 alleles.

[0171] Non-limiting examples of DR-DQ haplotypes include DR1-DQ5, DR3-DQ2, DR4-DQ7, DR4-DQ8, DR7-DQ2, DR7-DQ9, DR8-DQ4, DR8-DQ7, DR9-DQ9, DR10-DQ5, DR11-DQ7, DR12-DQ7, DR13-DQ6, DR13-DQ7, DR14-DQ5, DR15-DQ6, and DR16-DQ5.

[0172] According to some embodiments of the invention, the antigen is an autoantigen associated with an autoimmune disease.

[0173] The term “autoimmune disease” as used herein is defined as a disorder that results from an autoimmune response. An autoimmune disease is the result of an inappropriately excessive response to a self-antigen.

[0174] Examples of autoimmune diseases include but are not limited to, Addision's disease, alopecia greata, ankylosing spondylitis, autoimmune hepatitis, autoimmune parotitis, Crohn's disease, diabetes (Type 1), dystrophic epidermolysis bullosa, epididymitis, glomerulonephritis, Graves' disease, Guillain-Barr syndrome, Hashimoto's disease, hemolytic anemia, systemic lupus erythematosus, multiple sclerosis, myasthenia gravis, pemphigus vulgaris, psoriasis, rheumatic fever, rheumatoid arthritis, sarcoidosis, scleroderma, Sjogren's syndrome, spondyloarthropathies, thyroiditis, vasculitis, vitiligo, myxedema, pernicious anemia, ulcerative colitis, among others.

[0175] As used herein the phrase “autoantigenic peptide” refers to an antigen derived from an endogenous (i.e., self protein) or a consumed protein (e.g., by food) against which an inflammatory response is elicited as part of an autoimmune inflammatory response.

[0176] It should be noted that the phrases “endogenous”, “self” are relative expressions referring to the individual in which the autoimmune response is elicited. Auto-antigens comprise, but are not limited to, cellular proteins, phosphoproteins, cellular surface proteins, cellular lipids, nucleic acids, glycoproteins, including cell surface receptors.

[0177] It should be noted that presentation of an autoantigenic peptide on antigen presenting cells (APCs) can result in recognition of the MHC-autoantigenic peptides by specific T cells, and consequently generation of an inflammatory response that can activate and recruit T cell and B cell responses against the APCs cells.

[0178] A common basis for several autoimmune diseases, including Multiple Sclerosis (MS), Type 1 Diabetes (T1D) and Rheumatoid Arthritis (RA), is the strong linkage between HLA genotype and susceptibility to the disease (Nepom, 1991; Sawcer, 2005; McDaniel, 1989). While some alleles are tightly linked to certain diseases, others confer protection and are extremely rare in patients. This linkage is not surprising due to the involvement of T-cells in the progression of these diseases. Activation or disregulation of CD4+ T-cells directed to self organ-specific proteins, combined with yet-undefined events, may contribute to the pathogenesis of a variety of human autoimmune diseases.

[0179] Multiple sclerosis is an immune-mediated demyelinating and neurodegenerative disease of the central nervous system (CNS) (Trapp, 2008). Susceptibility to MS is associated with human leukocyte antigen (HLA) class II alleles, mostly the DR2 haplotype that includes the DRB1*1501, DRB1*0101, and DQB1*0602 genes (Olerup, 1991). DRB1*1501 is a well-studied risk factor of MS that occurs in about 60% of Caucasian MS patients vs. 25% of healthy controls. Contribution of these risk factors to disease process likely involves presentation of self antigens by disease-associated MHC expressed on antigen presenting cells (APC) that activate T-cell-mediated central nervous system (CNS) inflammation. Suspected MS autoantigens include myelin proteins such as myelin basic protein (MBP), proteolipid protein (PLP), and myelin oligodendrocyte glycoprotein (MOG). T-cells from MS patients were found to predominantly recognize MOG (Kerlero de rosbo, 1993; Kerlero de rosbo, 1998) as well as other myelin proteins, and the MOG-35-55 peptide was found to be highly encephalitogenic in rodents and monkeys (Mendel, 1995; Johns, 1995) and induces severe chronic experimental autoimmune encephalomyelitis (EAE) in HLA-DRB1*1501-Tg mice (Rich, 2004).

[0180] Type 1 Diabetes (T1D) involves progressive destruction of pancreatic beta-cells by autoreactive T-cells specific for antigens expressed in the pancreatic islets, including glutamic acid decarboxylase (GAD65) (Karslen, 1991). GAD65 is a suspected islet autoantigen in T1D, stimulating both humoral and cellular self reactivity in at-risk and diseased subjects. Antibodies to GAD65 in combination with antibodies directed at two additional islet autoantigens are predictive markers of T1D in at-risk subjects (Verge, 1996), and GAD-555-567 peptide has identical sequence in all GAD isoforms in human and mouse. This highly immunogenic determinant was found to be a naturally processed T-cell epitope both in disease-associated-HLA-DR4(*0401)-Tg-mice (Patel, 1997) and human T1D subjects (Reijonen, 2002; Nepom, 2001).

[0181] Celiac (Coeliac) is an autoimmune disorder of the small intestine that occurs in genetically predisposed people of all ages from middle infancy onward. Celiac is caused by a reaction to gliadin, a prolamin (gluten protein) found in wheat, and similar proteins found in the crops of the tribe Triticeae (e.g., barley and rye). Upon exposure to gliadin, and specifically to two peptides found in prolamins (Gliadin-61-71 and Gliadin-3-24) the immune system cross-reacts with the small-bowel tissue, causing an inflammatory reaction.

[0182] According to some embodiments of the invention the autoantigenic peptide is associated with a disease selected from the group consisting of diabetes, multiple sclerosis, rheumatoid arthritis, celiac disease and stroke.

[0183] As used herein the phrase “type I diabetes-associated autoantigenic peptide” refers to an antigen derived from a self protein (i.e., an endogenous protein), which is expressed in pancreatic cells such as beta cells of the pancreas, and against which an inflammatory response is elicited as part of an autoimmune inflammatory response. According to some embodiments of the invention, the diabetes-associated autoantigenic peptide is a beta-cell autoantigenic peptide.

[0184] It should be noted that a type I diabetes-associated autoantigenic peptide is an MHC class II-restricted peptide, which when presented on antigen presenting cells (APCs) is recognized by specific T cells. Such a presentation by APCs generates an inflammatory response that can activate and recruit T cell and B cell responses against beta cells, including the generation of cytotoxic T cells and antibodies which kill and destroy beta cells and thus lead to a decreased insulin production.

[0185] According to some embodiments of the invention, the diabetes-associated autoantigenic peptide is derived from a polypeptide selected from the group consisting of preproinsulin (amino acids 1-110 of GenBank Accession No. NP_000198, SEQ ID NO:36), proinsulin (amino acids 25-110 of GenBank Accession No. NP_000198, SEQ ID NO: 37), Glutamic acid decarboxylase (GAD, GenBank Accession No. NP_000809.1, SEQ ID NO: 38), Insulinoma Associated protein 2 (IA-2, GenBank accession No. NP_115983) SEQ ID NO: 39), IA-2β [also referred to as phogrin, GenBank Accession No. NP_570857.2 (SEQ ID NO: 40), NP_570858.2 (SEQ ID NO:41), NP_002838.2 (SEQ ID NO: 42)], Islet-specific Glucose-6-phosphatase catalytic subunit-Related Protein [IGRP; GeneID: 57818, GenBank Accession No. NP_066999.1, glucose-6-phosphatase 2 isoform 1 (SEQ ID NO: 43) and GenBank Accession No. NP_001075155.1, glucose-6-phosphatase 2 isoform 2 (SEQ ID NO: 44)], chromogranin A (GenBank Accession No. NP_001266 (SEQ ID NO: 45), Zinc Transporter 8 (ZnT8; GenBank Accession NO. NP_776250.2, SEQ ID NO: 46), Heat Shock Protein-60 (GenBank Accession No. NP_955472.1; SEQ ID NO: 47), and Heat Shock Protein-70 (GenBank Accession No. NP_005337.2 (SEQ ID NO: 48) and NP_005336.3 (SEQ ID NO: 49).

[0186] As used herein the phrase “glutamic acid decarboxylase (GAD)” refers to a family of proteins which are responsible for catalyzing the production of gamma-aminobutyric acid from L-glutamic acid. There are two major GAD enzymes in humans, GAD 65 kDa which is expressed in both brain and pancreas (Gene ID 2572; encoded by GenBank accession No. NM_000818.2 (SEQ ID NO:50); NM_001134366.1 (SEQ ID NO:51); NP_000809.1 (SEQ ID NO:38)] and GAD 67 kDa which is expressed in brain [GeneID 2571; encoded by GenBank accession No. NM_000817.2 (SEQ ID NO:52); NP_000808.2 (SEQ ID NO:53)]. GAD 65 kDa has been identified as an autoantibody and an autoreactive T cell target in insulin-dependent diabetes.

[0187] According to some embodiments of the invention, the diabetes-associated autoantigenic peptide is GAD₅₅₅₋₅₆₇ (NFFRMVISNPAAT; SEQ ID NO:4).

[0188] Tables 3, 4 and 5, hereinbelow, provide non-limiting examples of MHC class II restricted diabetes associated autoantigens which can form a complex with an MHC class II molecule according to some embodiments of the invention.

TABLE 3
GAD, ZnT8 and IA-2 derived autoantigenic peptides

| SEQ | | | SEQ | | | SEQ | | |
|---|---|---|---|---|---|---|---|---|
| ID | | | ID | | | ID | | |
| NO: | GAD | MHC | NO: | ZnT8 | MHC | NO: | IA-2 | MHC |
| 256 | MNILLQYV | DR4 | 304 | LTIQIES | DQ8 | 312 | VSSVSSQ | |
| | VKSFD | | | AADQDPS | | | FSDAAQA | DR4 |
| | | | | | | | SPSSFSD | |
| 257 | IAPVFVLLE | DR4 | 305 | RTGIAQ | DQ8 | 313 | LAKEWQ | DR4 |
| | | | | ALSSFD | | | ALCAYQ | |
| | | | | LH | | | AEPNTCA | |
| | | | | | | | TAQGE | |
| 258 | LPRLIAFTS | DR4 | 306 | LYPDYQ | DQ8 | 314 | KLKVESS | DR4 |
| | EHSHF | | | IQAGIMIT | | | PSRSDYIN | |
| | | | | | | | ASPIIEHDP | |
| 259 | IAFTSEHSH | DR4 | 307 | ILSVHV | DQ8 | 315 | IKLKVESS | DR4 |
| | FSLK | | | ATAASQ | | | PSRSDYIN | |
| | | | | DS | | | ASPI | |
| 260 | TVYGAFDP | DR4 | 308 | SKRLTF | DQ8 | 316 | MVWESG | DR4 |
| | LLAVAD | | | GWYRA | | | CTVIVML | |
| | | | | EIL | | | TPLVEDGV | |
| 261 | KYKIWMH | DR4 | 309 | AILTDA | DQ8 | 317 | RQHARQ | DQ8 |
| | VDAAWGGG | | | AHLLID | | | QDKERLA | |
| | | | | LT | | | ALGPE | |
| 262 | KHKWKLS | DR4 | 310 | KATGNR | DQ8 | 318 | GPEGAHG | DQ8 |
| | GVERANSV | | | SSKQAH | | | DTTFEYQ | |
| | | | | AK | | | DLCR | |
| 263 | LYNIIKNRE | DR4 | 311 | AVDGVI | DQ8 | 319 | EGPPEPSR | DQ8 |
| | GYEMVF | | | SVHSLHIW | | | VSSVSSQ | |
| | | | | | | | FSD | |
| 264 | PSLRTLED | DR4 | | | | 320 | FSDAAQA | DQ8 |
| | NEERMSR | | | | | | SPSSHSST | |
| | | | | | | | PSW | |
| 265 | RMMEYGT | DR4 | | | | 321 | AEPNTCA | DQ8 |
| | TMVSYQPL | | | | | | TAQGEGN | |
| | | | | | | | IKKN | |
| 266 | SYQPLGDK | DR4 | | | | 322 | NASPIIEH | DQ8 |
| | VNFFRMV | | | | | | DPRMPAY | |
| | | | | | | | IAT | |
| 267 | NFFRMVIS | DR4 | | | | 323 | DEGSALY | DQ8 |
| | NPAAT | | | | | | HVYEVNL | |
| | | | | | | | VSEH | |
| 268 | ATHQDIDF | DR4 | | | | 324 | KGVKEID | DQ8 |
| | LIEEIER | | | | | | IAATLEH | |
| | | | | | | | VRDO | |
| 269 | ATDLLPACD | DQ8 | | | | 325 | FALTAVA | DQ8 |
| | | | | | | | EEVNAIL | |
| | | | | | | | KALPQ | |
| 270 | FDRSTKVI | DQ8 | | | | 326 | KNRSLAV | DQ8 |
| | DFHYPNE | | | | | | LTYDHSRI | |
| 271 | ELLQEYN | DQ8 | | | | 327 | GADPSAD | DQ8 |
| | WE | | | | | | ATEAYQEL | |
| 272 | EYNWELA | DQ8 | | | | 328 | EIDIAATLE | DQ8 |
| | DQ | | | | | | | |
| 273 | DIDFLIEEI | DQ8 | | | | 329 | NTCATAQ | DQ8 |
| | | | | | | | GE | |
| 274 | TGHPRYFN | DQ8 | | | | 330 | EPNTCAT | DQ8 |
| | QLSTGLD | | | | | | AQ | |
| 275 | TYEIAPVF | DQ8 | | | | 331 | ERLAALG | DQ8 |
| | VLLEYVT | | | | | | PE | |
| 276 | YVTLKKM | DQ8 | | | | 332 | QHARQQ | DQ8 |
| | RE | | | | | | DKE | |
| 277 | PGGSGDGI | DQ8 | | | | 333 | YEVNLVS | DQ8 |
| | FSPGGAISN | | | | | | EH | |
| | MYA | | | | | | | |
| 278 | NMYAMMI | DQ8 | | | | 334 | GASLYHV | DQ8 |
| | ARFKMFPE | | | | | | YE | |
| | VKEKG | | | | | | | |
| 279 | PEVKEKG | DQ8 | | | | 335 | FALTAVA | DQ8 |
| | MAALPRLI | | | | | | EE | |
| | AFTSE | | | | | | | |
| 280 | DSVILIKCD | DQ8 | | | | 336 | GAHGDTT | DQ8 |
| | | | | | | | FE | |
| 281 | GKMIPSDLE | DQ8 | | | | 337 | GDTTFEY | DQ8 |
| | | | | | | | QD | |
| 282 | ERRILEAKQ | DQ8 | | | | 338 | AAQASPS | DQ8 |
| | | | | | | | SH | |
| 283 | ERANSVT | DQ8 | | | | 339 | SRVSSVS | DQ8 |
| | WN | | | | | | SQ | |
| 284 | QCSALLVRE | DQ8 | | | | 340 | TQFHFLS | DQ8 |
| | | | | | | | WP | |
| 285 | KHYDLSYD | DQ8 | | | | 341 | EEPAQAN | DQ8 |
| | TGDKALQ | | | | | | MD | |
| 286 | AKGTTGFE | DQ | | | | 342 | GHMILAY | DQ8 |
| | AHVDKCL | | | | | | ME | |
| 287 | VDKCLELA | DQ8 | | | | 343 | MILAYME | DQ8 |
| | EYLYNIIKN | | | | | | DH | |
| | REG | | | | | | | |
| 288 | IIKNREGYE | DQ8 | | | | 344 | QALCAY | DQ8 |
| | | | | | | | QAE | |
| 289 | MVFDGKP | DQ8 | | | | 345 | EWQALC | DQ8 |
| | QHTNVCFW | | | | | | AYQ | |
| 290 | CFWYIPPSL | DQ8 | | | | 346 | LVRSKDQ | DQ8 |
| | RTLEDN | | | | | | FE | |
| 291 | FWYIPPSLR | DQ8 | | | | 347 | VEDGVK | DQ8 |
| | TLED | | | | | | QCD | |
| 292 | SLRTLEDNE | DQ8 | | | | 348 | YILIDMV | DQ8 |
| | | | | | | | LN | |
| 293 | ERMSRLSK | DQ8 | | | | 349 | ESGCTVI | DQ8 |
| | VAPVIKA | | | | | | VM | |
| 294 | IKARMME | DQ8 | | | | 350 | LCAYQAE | DQ8 |
| | YGTTMVSY | | | | | | PN | |
| 295 | RMMEYGT | DQ8 | | | | 351 | ETRTLTQ | DQ8 |
| | TMVSYQPL | | | | | | FH | |
| 296 | VISNPAATH | DQ8 | | | | 352 | VESSPSRSD | DQ8 |
| 297 | IDFLIEEIE | DQ8 | | | | 353 | GPLSHTIAD | DQ8 |
| 298 | NWELADQ | DR2 | | | | 354 | SLFNRAE | DQ8 |
| | PQNLEEIL | | | | | | GP | |
| | MHCQT | | | | | | | |
| 299 | GHPRYFNQ | DR2 | | | | 355 | HPDFLPY | DQ8 |
| | LSTG | | | | | | DH | |
| 300 | TYEIAPVF | DR2 | | | | 356 | HFLSWPA | DQ8 |
| | VLLFYVTL | | | | | | EG | |
| | KKMR | | | | | | | |
| 301 | VNFFRMVI | DR4 | | | | 357 | DFRRKVN | DQ8 |
| | SNPAATHQD | | | | | | KC | |
| 302 | DKVNFFR | DR4 | | | | 358 | HCSDGAG | DQ8 |
| | MVISNPAA | | | | | | RT | |
| | THQDID | | | | | | | |
| 303 | FFRMVISN | core | | | | 359 | LVRSFYL | DQ8 |
| | PA | sequence | | | | | KN | |
| | | | | | | 360 | KNRSLAV | DQ8 |
| | | | | | | | LTYDHSRI | |
| | | | | | | 361 | GADPSAD | DQ8 |
| | | | | | | | ATEAYQEL | |
| | | | | | | 362 | ANMDIST | Unknown |
| | | | | | | | GHMILAY | |
| | | | | | | | ME | |
| | | | | | | 363 | WQALCA | unknown |
| | | | | | | | YQAEPNT | |
| | | | | | | | CAT | |
| | | | | | | 364 | LSHTIADF | unknown |
| | | | | | | | WQMVWE | |
| | | | | | | | SG | |
| | | | | | | 365 | DFWQMV | unknown |
| | | | | | | | WESGCTV | |
| | | | | | | | IVM | |
| | | | | | | 366 | WESGCTV | unknown |
| | | | | | | | IVMLTPL | |
| | | | | | | | VE | |
| | | | | | | 367 | VIVMLTP | unknown |
| | | | | | | | LVEDGVK | |
| | | | | | | | QC | |
| | | | | | | 368 | SEHIWCE | unknown |
| | | | | | | | DFLVRSF | |
| | | | | | | | YL | |
| | | | | | | 369 | WCEDFLV | unknown |
| | | | | | | | RSFYLKN | |
| | | | | | | | VQ | |
| | | | | | | 370 | EDFLVRS | unknown |
| | | | | | | | FYLKNVQ | |
| | | | | | | | TQ | |
| | | | | | | 371 | DFRRKVN | unknown |
| | | | | | | | KCYRGRS | |
| | | | | | | | CP | |
| | | | | | | 372 | YILIDMV | unknown |
| | | | | | | | LNRMAK | |
| | | | | | | | GVK | |
| | | | | | | 373 | FEFALTA | unknown |
| | | | | | | | VAEEVNA | |
| | | | | | | | IL | |

Table 3 Provided are diabetes-associated autoantigenic peptides (with their sequence identifiers, SEQ ID NO:) and the MHC class II molecules which bind thereto.

TABLE 4
Preproinsulin and HSP-60 autoantigenic peptide

| SEQ | | | SEQ | | |
|---|---|---|---|---|---|
| ID | | | ID | | |
| NO: | PREPROINSULIN | MHC | NO: | HSP-60 | MHC |
| 374 | EALYLVCGE | DQ8 | 395 | KFGADARALML | Unknown |
| | | | | QGVDLLADA | |
| 375 | SICSLYQLE | DQ8 | 396 | NPVEIRRGVMLA | Unknown |
| | | | | VDAVIAEL | |
| 376 | ALLALWGPD | DQ8 | 397 | QSIVPALEIANAH | Unknown |
| | | | | RKPLVIIA | |
| 377 | GSLQPLALE | DQ8 | 398 | LVLNRLKVGLQ | Unknown |
| | | | | VVAVKAPGF | |
| 378 | TPKTRREAE | DQ8 | 399 | IVLGGGCALLRCI | Unknown |
| | | | | PALDSLT | |
| 379 | PAAAFVNQH | DQ8 | 400 | VLGGGCALLRCI | Unknown |
| | | | | PALDSLTPANED | |
| 380 | DPAAAFVNQ | DQ8 | 401 | EIIKRTLKIPAMTI | Unknown |
| | | | | AKNAGV | |
| 381 | PDPAAAFVN | DQ8 | 402 | VNMVEKGIIDPT | Unknown |
| | | | | KVVRTALL | |
| 382 | QKRGIVEQC | DQ8 | | | |
| 383 | ELGGGPGAG | DQ8 | | | |
| 384 | EAEDLQVGQ | DQ8 | | | |
| 385 | LQVGQVELG | DQ8 | | | |
| 386 | HLCGSHLVE | DQ8 | | | |
| 387 | GIVEQCCTSICS | DR4 | | | |
| 388 | KRGIVEQCCT | DR4 | | | |
| | SICS | | | | |
| 389 | LALLALWGP | Unknown | | | |
| | DPAAAFV | | | | |
| 390 | PAAAFVNQH | Unknown | | | |
| | LCGSHLV | | | | |
| 391 | SHLVEALYLV | Unknown | | | |
| | CGERG | | | | |
| 392 | FFYTPKTRRE | Unknown | | | |
| | AED | | | | |
| 393 | GAGSLQPLAL | Unknown | | | |
| | EGSLQKRG | | | | |
| 394 | SLQKRGIVEQ | Unknown | | | |
| | CCTSICS | | | | |

Table 4. Provided are the diabetes-associated autoantigenic peptides (with their sequence identifiers, SEQ ID NO:) and the MHC class II molecules which bind thereto.

TABLE 5
HSP-70 and IGRP derived autoantigenic peptides

| SEQ | | | | | |
|---|---|---|---|---|---|
| ID | | | SEQ ID | | |
| NO: | HSP-70 | MHC | NO: | IGRP | MHC |
| 403 | MAKAAAVGIDLGTT | Unknown | 412 | QHLQKDYRAY | DR3 |
| | YSCVGV | | | YTF | |
| 404 | GLNVLRIINEPTAAAI | Unknown | 413 | RVLNIDLLWSV | DR3 |
| | AYGL | | | PI | |
| 405 | TIDDGIFEVKATAGD | Unknown | 414 | YTFLNFMSNV | DR4 |
| | THLGG | | | GDP | |
| 406 | THLGGEDFDNRLVN | Unknown | 415 | DWIHIDTTPFA | DR4 |
| | HFVEEF | | | GL | |
| 407 | KRTLSSSTQASLEIDS | Unknown | | | |
| | LFEG | | | | |
| 408 | LLLLDVAPLSLGLET | Unknown | | | |
| | AGGVM | | | | |
| 409 | PTKQTQIFTTYSDNQP | Unknown | | | |
| | GVLI | | | | |
| 410 | KANKITITNDKGRLS | Unknown | | | |
| | KEEIE | | | | |
| 411 | KEEIERMVQEAEKYK | Unknown | | | |
| | AEDEV | | | | |

Table 5. Provided are the diabetes-associated autoantigenic peptides (with their sequence identifiers, SEQ ID NO:) and the MHC class II molecules which bind thereto.

[0189] Further description of type I diabetes-associated autoantigenic peptides can be found in Lieberman S M, DiLorenzo T P, 2003. A comprehensive guide to antibody and T-cell responses in type 1 diabetes. Tissue Antigens, 62:359-77; Liu J, Purdy L E, Rabinovitch S, Jevnikar A M, Elliott J F. 1999, Major DQ8-restricted T-cell epitopes for human GAD65 mapped using human CD4, DQA1*0301, DQB1*0302 transgenic IA(null) NOD mice, Diabetes, 48: 469-77; Di Lorenzo T P, Peakman M, Roep B O. 2007, Translational mini-review series on type 1 diabetes: Systematic analysis of T cell epitopes in autoimmune diabetes. Clin Exp Immunol. 148:1-16; Stadinski et al Immunity 32:446, 2010; each of which is fully incorporated herein by reference).

[0190] According to some embodiments of the invention, the GAD autoantigenic peptide comprises a core amino acid sequence set forth by SEQ ID NO: 5 (GAD₅₅₆₋₅₆₅, FFRMVISNPA).

[0191] According to some embodiments of the invention, the GAD autoantigenic peptide comprises a core amino acid sequence set forth by SEQ ID NO: 5 (GAD₅₅₆₋₅₆₅, FFRMVISNPA) and no more than 30 amino acids.

[0192] According to some embodiments of the invention, the GAD autoantigenic peptide is GAD₅₅₅₋₅₆₇ (NFFRMVISNPAAT; SEQ ID NO:4).

[0193] According to some embodiments of the invention, the diabetes-associated autoantigenic peptide is a GAD derived autoantigenic peptide selected from the group consisting of SEQ ID NOs:256-303

[0194] According to some embodiments of the invention, the diabetes-associated autoantigenic peptide is a ZnT8 derived autoantigenic peptide selected from the group consisting of SEQ ID NOs: 304-311.

[0195] According to some embodiments of the invention, the diabetes-associated autoantigenic peptide is a IA-2 derived autoantigenic peptide selected from the group consisting of SEQ ID NOs: 312-373.

[0196] According to some embodiments of the invention, the diabetes-associated autoantigenic peptide is a preproinsulin derived autoantigenic peptide selected from the group consisting of SEQ ID NOs:374-394.

[0197] According to some embodiments of the invention, the diabetes-associated autoantigenic peptide is a HSP-60 derived autoantigenic peptide selected from the group consisting of SEQ ID NOs: 395-402.

[0198] According to some embodiments of the invention, the diabetes-associated autoantigenic peptide is a HSP-70 derived autoantigenic peptide selected from the group consisting of SEQ ID NOs: 403-411.

[0199] According to some embodiments of the invention, the diabetes-associated autoantigenic peptide is a IGRP derived autoantigenic peptide selected from the group consisting of SEQ ID NOs:412-415.

[0200] According to some embodiments of the invention, the multiple sclerosis-associated autoantigenic peptide is derived from a polypeptide selected from the group consisting of myelin oligodendrocyte glycoprotein [MOG; GenBank Accession Nos. NP_001008229.1 (SEQ ID NO: 54); NP_001008230.1 (SEQ ID NO: 55); NP_001163889 (SEQ ID NO: 56); NP_002424.3 (SEQ ID NO: 57); NP_996532 (SEQ ID NO: 58); NP_996533.2 (SEQ ID NO: 59); NP_996534.2 (SEQ ID NO: 60); NP_996535.2 (SEQ ID NO: 61); NP_996537.3 (SEQ ID NO: 62)], myelin basic protein [MBP; GenBank Accession Nos. NP_001020252.1 (SEQ ID NO: 63); NP_001020261.1 (SEQ ID NO: 64); NP_001020263.1 (SEQ ID NO: 65); NP_001020271.1 (SEQ ID NO: 66); NP_001020272.1 (SEQ ID NO: 67); NP_002376.1 (SEQ ID NO: 68)], and proteolipid protein [PLP1; GenBank Accession Nos. NP_000524.3 (SEQ ID NO: 69); NP_001122306.1 (SEQ ID NO: 70); NP_955772.1 (SEQ ID NO: 71)].

[0201] Tables 6 and 7, hereinbelow, provide non-limiting examples of MHC class II restricted multiple sclerosis associated autoantigens which can form a complex with an MHC class II molecule according to some embodiments of the invention.

TABLE 6
Multiple sclerosis associated autoantigens derived
from Myelin basic protein (MBP) and ProteoLipid
Protein (PLP)

| SEQ ID | MBP (Myelin basic | | SEQ ID | PLP (Proteo Lipid | |
|---|---|---|---|---|---|
| NO: | protein) | MHC | NO: | protein) | MHC |
| 416 | RSQPGLCNMYKDSHHP | unknown | 424 | VFACSAVPVYI | unknown |
| | ARTA | | | YFNTWTTCQS | |
| 417 | FKGVDAQGTLSKIFKLG | unknown | 425 | YIYFNTWTTCQ | unknown |
| | GRDS | | | SIAFPSKTSA | |
| 418 | GDRGAPKRGSGKVPWL | DP | 426 | AHSLERVCHCL | DR |
| | KPGRS | | | GKWLGHPDKF | |
| 419 | RSQPGLCNMYKDSHHP | DP | 427 | AVRQIFGDYKT | DR |
| | ARTA | | | TICGKGLSAT | |
| 420 | SDYKSAHKGFKGVDAQ | DR | 428 | FMIAATYNFAV | DR |
| | GTLSK | | | LKLMGRGTKF | |
| 421 | FKGVDAQGTLSKIFKLG | DR | 429 | AHSLERVCHCL | DQ |
| | GRDS | | | GKWLGHPDKF | |
| 422 | SDYKSAHKGFKGVDAQ | DQ | 430 | AVRQIFGDYKT | DQ |
| | GTLSK | | | TICGKGLSAT | |
| 423 | ENPVVHFFKNIVTPR | DR2 | 431 | CQSIAFPSKTSA | DQ |
| | | | | SIGSLCAD | |
| | | | 432 | SKTSASIGSLC | DQ |
| | | | | ADARMYGVL | |
| | | | 433 | GVLPWNAFPG | DQ |
| | | | | KVCGSNLLSI | |
| | | | 434 | FMIAATYNFAV | DQ |
| | | | | LKLMGRGTKF | |

Table 6.

TABLE 7
Multiple sclerosis associated autoantigens
derived from Myelin Oligodendrocyte
Glycoprotein (MOG)

| MHC | SEQ ID NO: | Peptide |
|---|---|---|
| unknown | 435 | ELKVEDPFYWVSPGVLVLLAV |
| unknown | 436 | TFDPHFLRVPCWKITLFVIV |
| unknown | 437 | VIVPVLGPLVALIICYNWLHR |
| unknown | 438 | VALIICYNWLHRRLAGQFLEE |
| DR | 439 | GFTCFFRDHSYQEEAAMELKV |
| DR | 440 | ITVGLVFLCLQYRLRGKLRAE |
| DR | 441 | VALIICYNWLHRRLAGQFLEE |
| DR | 442 | LQYRLRGKLRAEIENLHRTFD |
| DQ | 443 | ELKVEDPFYWVSPGVLVLLAV |
| DQ | 444 | LQYRLRGKLRAEIENLHRTFD |
| DR2 | 472 | MEVGWYRPPFSRVVHLYRNGK |
| DR2 | 445 | PERYGRTELLKDAIGEGKVTLRIRN |
| DR4 | 446 | TCFFRDHSYQEE |
| DR4 | 447 | FVIVPVLGP |
| DR4 | 448 | KITLFVIVPVLGP |

Table 7.

[0202] According to some embodiments of the invention, the MOG autoantigenic peptide is MOG-35-55 (SEQ ID NO: 6; MEVGWYRPPFSRVVHLYRNGK).

[0203] According to some embodiments of the invention, the MBP autoantigenic peptide is MBP-85-99 (SEQ ID NO: 22).

[0204] According to some embodiments of the invention, the rheumatoid arthritis-associated autoantigenic peptide is derived from a polypeptide selected from the group consisting of: Collagen II (COL2A1, GenBank Accession NO. NP_001835.3; SEQ ID NO: 81), Matrix metalloproteinase-1 (MMP1) [GenBank Accession NO. NP_001139410.1 (SEQ ID NO:72); and GenBank Accession NO. NP_002412.1 (SEQ ID NO:73)], Aggrecan Core Protein Precursor (ACAN) [GenBank Accession NO. NP_001126.3 (SEQ ID NO:74); and GenBank Accession NO. NP_037359.3 (SEQ ID NO:75)], Matrix Metalloproteinase-16 (MMP16) [GenBank Accession NO. NP_005932.2 (SEQ ID NO:76)], Tenascin (TNXB) [GenBank Accession NO.

[0205] NP_061978.6 (SEQ ID NO:77) and GenBank Accession NO. NP_115859.2 (SEQ ID NO:78)] and Heterogeneous Nuclear Ribonucleoprotein A2 (HNRNPA2B1) [GenBank Accession NO. XP_005249786.1 (SEQ ID NO:79) and GenBank Accession NO. XP_006715777.1 (SEQ ID NO:80)].

[0206] Tables 8-12, hereinbelow, provide non-limiting examples of MHC class II restricted rheumatoid arthritis associated autoantigens which can form a complex with an MHC class II molecule according to some embodiments of the invention.

TABLE 8
Rheumatoid arthritis associated Collagen II and
Matrix metalloproteinase-1 autoantigens

| | SEQ | | | SEQ | Matrix |
|---|---|---|---|---|---|
| | ID | collagen II autoantigenic | | ID | metalloproteinase-1 |
| MHC | NO: | peptide | MHC | NO: | autoantigenic peptide |
| DR4/ | 449 | AGFKGEQGPKGEP | unknown | 451 | GVVSHSFPATLETQE |
| DR1 | | | | | |
| DR4/ | 450 | EPGIAGFKGEQGPKGEPG | unknown | | |
| DR1 | | | | | |

Table 8.

TABLE 9
Rheumatoid arthritis associated Aggrecan core protein
precursor and Matrix metalloproteinase-3 autoantigens

| | | | | | MATRIX |
|---|---|---|---|---|---|
| | SEQ | AGGRECAN CORE PROTEIN | | SEQ | METALLOPROTEINASE-3 |
| | ID | PRECURSOR | | ID | AUTOANTIGENIC |
| MHC | NO: | AUTOANTIGENIC PEPTIDE | MHC | NO: | PEPTIDE |
| unknown | 452 | LSGLPSGGEVLEISV | unknown | 454 | FFYFFTGSSQLEFDP |
| unknown | 453 | ISGLPSGGDDLETST | | | |

Table 9.

TABLE 10
Rheumatoid arthritis associated Calpain-2 and
Matrix metalloproteinase-10 autoantigens

| | SEQ | | | SEQ | Matrix |
|---|---|---|---|---|---|
| | ID | Calpain-2 autoantigenic | | ID | metalloproteinase-10 |
| MHC | NO: | peptide | MHC | NO: | autoantigenic peptide |
| unknown | 455 | HAYSVTGAEEVESNG | unknown | 456 | SAFWPSLPSGLDAAY |

Table 10.

TABLE 11
Rheumatoid arthritis associated Fibrillin-1 precursor
and Matrix metalloproteinase-16 autoantigens

| | SEQ | | | SEQ | Matrix |
|---|---|---|---|---|---|
| | ID | Fibrillin-1 precursor | | ID | metalloproteinase-16 |
| MHC | NO: | autoantigenic peptide | MHC | NO: | autoantigenic peptide |
| unknown | 457 | CVDTRSGNCYLDIRP | unknown | 458 | VKEGHSPPDDVDIVI |

Table 11.

TABLE 12
Rheumatoid arthritis associated Tenascin and heterogeneous
nuclear ribonucleoprotein A2 autoantigens

| | SEQ | | | SEQ | Heterogeneous nuclear |
|---|---|---|---|---|---|
| | ID | Tenascin autoantigenic | | ID | ribonucleoprotein A2 |
| MHC | NO: | peptide | MHC | NO: | autoantigenic peptide |
| unknown | 459 | EPVSGSFTTALDGPS | DR1/DR4 | 460 | RDYFEEYGKIDTIEIIT |

Table 12.

[0207] According to some embodiments of the invention, the celiac-associated autoantigenic peptide is derived from alpha Gliadin [e.g., GenBank Accession Nos. ADM96154 (SEQ ID NO: 82), ADD17013.1 (SEQ ID NO: 83)], gamma Gliadin [e.g., from Aegilops tauschii GenBank Accession No. CAC10631.1, SEQ ID NO: 84] and Heat shock 20 [GenBank Accession No. AAB81196 (SEQ ID NO: 85)].

[0208] Tables 13 and 14, hereinbelow, provide a non-limiting list of MHC class II restricted celiac associated autoantigens which can form a complex with an MHC class II molecule according to some embodiments of the invention.

TABLE 13
Celiac associated gliadin autoantigens

| | SEQ | | | SEQ | |
|---|---|---|---|---|---|
| | ID | | | ID | α-gliadin |
| MHC | NO: | α-Gliadin autoantigenic peptide | MHC | NO: | autoantigenic peptide |
| DQ2/DQ8 | 461 | LGQQQPFPPQQPY | DQ2 | 462 | QLQPFPQPQLPY |
| DQ2/DQ8 | 473 | FPQPELPYPQP (Gliadin-61-71) | DQ2 | 463 | PQPQLPYPQPQLPY |
| DQ2/DQ8 | 474 | VPVPQLQPQNPSQQQPQEQVPL | DQ2 | 464 | PGQQQPFPPQQPY |
| | | (Gliadin-3-24) | | | |

Table 13.

TABLE 14
Celiac associated γ-gliadin and heat shock 20 autoantigens

| | | | | | Heat shock 20 |
|---|---|---|---|---|---|
| | SEQ | | | SEQ | autoantigenic |
| MHC | ID NO: | γ-Gliadin autoantigenic peptide | MHC | ID NO: | peptide |
| DQ2 | 465 | GIIQPQQPAQL | unknown | 470 | ALPTAQVPTDP |
| DQ2 | 466 | FPQQPQQPYPQQP | unknown | 471 | GRLFDQRFGEG |
| DQ2 | 467 | FSQPQQQFPQPQ | | | |
| DQ2 | 468 | PQQPFPQQPQQPY | | | |
| DQ2 | 469 | FLQPQQPFPQQPQQPYPQQPQQPFPQ | | | |

Table 14.

[0209] According to some embodiments of the invention, the stroke-associated autoantigenic peptide is derived from a brain antigen such as myelin basic protein, neurofilaments and the NR2A/2B subtype of the N-methyl-D-aspartate receptor (MOG-35-55-MEVGWYRPPFSRVVHLYRNGK (SEQ ID NO: 6)).

[0210] Since the amino acid sequence of the autoantigen may vary in length between the same or different MHC class II alleles, the length of the autoantigenic peptides according to some embodiments of the invention may vary from at least 6 amino acids, to autoantigenic peptides having at least 8, 10, 25, or up to 30 amino acids.

[0211] According to some embodiments of the invention, the autoantigenic peptide includes a core amino acids of at least 6 amino acids, e.g., at least 7, at least 8, at least 9 and more.

[0212] According to some embodiments of the invention, the length of the autoantigenic peptide does not exceed about 100 amino acids, e.g., does not exceed about 50 amino acids, e.g., does not exceed about 30 amino acids.

[0213] According to some embodiments of the invention, the length of the autoantigenic peptide includes at least 6 and no more than 30 amino acids.

[0214] In addition, it should be noted that although some amino acids in each autoantigenic peptide are conserved between various alleles of MHC class II and cannot be substituted, other amino acids can be substituted with amino acids having essentially equivalent specificity and/or affinity of binding to MHC molecules and resulting in equivalent T cell epitope as the amino acid sequences shown in the exemplary autoantigens described above. Thus, in each autoantigenic peptide there are at least six amino acids constituting a core amino acid which are required for recognition with the respective MHC class II molecule. Identification of the core amino acids for each autoantigenic peptide can be done experimentally, e.g., by mutagenesis of the amino acids constituting the autoantigenic peptide and detection of: (i) binding to the restricted MHC class II molecules; (ii) Stimulating the restricted T cell response. The core amino acid sequence consists of anchor residues and the T-cell receptor (TCR) contact residues. For example, for the GAD autoantigenic peptide the anchor residues in the sequence NFFRMVISNPAAT (SEQ ID NO: 32) are the P1 (F557), P4 (V560), P6 (S562), and P9 (A565) MHC pocket-binding residues. TCR contact residues in the sequence NFFRMVISNPAAT (SEQ ID NO: 33) are at positions F556, R558, M559, I561, N563. Accordingly, the core amino acids of the GAD555-567 autoantigenic peptide are GAD556-565 (FFRMVISNPA, SEQ ID NO: 5).

[0215] The invention according to some embodiments thereof also concerns peptide variants whose sequences do not completely correspond with the aforementioned amino acid sequences but which only have identical or closely related “anchor positions”. The term “anchor position” in this connection denotes an essential amino acid residue for binding to a MHC class II complex (e.g., DR1, DR2, DR3, DR4 or DQ). The anchor position for the DRB1*0401 binding motif are for example stated in Hammer et al., Cell 74 (1993), 197-203. Such anchor positions are conserved in the autoantigenic peptide or are optionally replaced by amino acid residues with chemically very closely related side chains (e.g. alanine by valine, leucine by isoleucine and visa versa). The anchor position in the peptides according to some embodiments of the invention can be determined in a simple manner by testing variants of the aforementioned specific peptides for their binding ability to MHC molecules. Peptides according to some embodiments of the invention are characterized in that they have an essentially equivalent specificity or/and affinity of binding to MHC molecules as the aforementioned peptides. Homologous peptides having at least 50%, e.g., at least 60%, 70%, 80%, 90%, 95% or more identity to the autoantigenic peptides described herein are also contemplated by some embodiments of the invention.

[0216] According to some embodiments of the invention, the antigen is a non-MHC restricted antigen.

[0217] Table 15 below provides a non-limiting list of non-MHC restricted antigens which can be used according to some embodiments of the invention.

TABLE 15
Tumors antigens and CARs in in vitro and in vivo trials

| | | SEQ | | | |
|---|---|---|---|---|---|
| | GenBank Accession | ID | Associated | | CARs |
| Target antigen | No. | NO: | malignancy | Receptor type | generation |
| α-Folate receptor | folate receptor 1 | 150-154 | Ovarian cancer | ScFv- | First |
| | (FOLR1) GenBank | | | FcεRIγCAIX | |
| | Accession Nos. | | | | |
| | NP_000793.1; | | | | |
| | NP_057936.1; | | | | |
| | NP_057937.1; | | | | |
| | NP_057941.1 | | | | |
| CAIX | carbonic anhydrase | 155 | Renal cell | ScFv-FcεRIγ | First |
| | IX GenBank | | carcinoma | | |
| | Accession No._{—} | | | | |
| | NP_001207.2 | | | | |
| CD19 | CD19 molecule | 156-157 | B-cell malignancies | ScFv-CD3ζ | First |
| | GenBank Accession | | | (EBV) | |
| | Nos._{—} | | | | |
| | NP_001171569.1; | | | | |
| | NP_001761.3 | | | | |
| CD19 | | | B-cell malignancies, | ScFv-CD3ζ | First |
| | | | CLL | | |
| CD19 | | | B-ALL | ScFv-CD28- | Second |
| | | | | CD3ζ | |
| CD19 | | | ALL | CD3ζ(EBV) | First |
| CD19 | | | ALL post-HSCT | ScFv-CD28- | Second |
| | | | | CD3ζ | |
| CD19 | | | Leukemia, | ScFv-CD28- | First and |
| | | | lymphoma, CLL | CD3ζ vs. | Second |
| | | | | CD3ζ | |
| CD19 | | | B-cell malignancies | ScFv-CD28- | Second |
| | | | | CD3ζ | |
| CD19 | | | B-cell malignancies | ScFv-CD28- | Second |
| | | | post-HSCT | CD3ζ | |
| CD19 | | | Refractory | ScFv-CD3ζ | First |
| | | | Follicular | | |
| | | | Lymphoma | | |
| CD19 | | | B-NHL | ScFv-CD3ζ | First |
| CD19 | | | B-lineage lymphoid | ScFv-CD28- | Second |
| | | | malignancies post- | CD3ζ | |
| | | | UCBT | | |
| CD19 | | | CLL, B-NHL | ScFv-CD28- | Second |
| | | | | CD3ζ | |
| CD19 | | | B-cell malignancies, | ScFv-CD28- | Second |
| | | | CLL, B-NHL | CD3ζ | |
| CD19 | | | ALL, lymphoma | ScFv-41BB- | First and |
| | | | | CD3ζ vs | Second |
| | | | | CD3ζ | |
| CD19 | | | ALL | ScFv-41BB- | Second |
| | | | | CD3ζ | |
| CD19 | | | B-cell malignancies | ScFv-CD3ζ | First |
| | | | | (Influenza | |
| | | | | MP-1) | |
| CD19 | | | B-cell malignancies | ScFv-CD3ζ | First |
| | | | | (VZV) | |
| CD20 | membrane-spanning | 158-159 | Lymphomas | ScFv-CD28- | Second |
| | 4-domains, | | | CD3ζ | |
| | subfamily A, | | | | |
| | member 1 (MS4A1, | | | | |
| | CD20) GenBank | | | | |
| | Accession Nos. | | | | |
| | NP_068769.2; | | | | |
| | NP_690605.1 | | | | |
| CD20 | | | B-cell malignancies | ScFv-CD4- | Second |
| | | | | CD3ζ | |
| CD20 | | | B-cell lymphomas | ScFv-CD3ζ | First |
| CD20 | | | Mantle cell | ScFv-CD3ζ | First |
| | | | lymphoma | | |
| CD20 | | | Mantle cell | CD3 ζ/ | Third |
| | | | lymphoma, indolent | CD137/CD28 | |
| | | | B-NHL | | |
| CD20 | | | indolent B cell | ScFv-CD28- | Second |
| | | | lymphomas | CD3ζ | |
| CD20 | | | Indolent B cell | ScFv-CD28- | Third |
| | | | lymphomas | 41BB-CD3ζ | |
| CD22 | CD22 molecule | 160-164 | B-cell malignancies | SFV-CD4- | Second |
| | GenBank Accession | | | CD3ζ | |
| | Nos. | | | | |
| | NP_001172028.1; | | | | |
| | NP_001172029.1; | | | | |
| | NP_001172030.1; | | | | |
| | NP_001265346.1; | | | | |
| | NP_001762.2; | | | | |
| CD30 | tumor necrosis factor | 165-166 | Lymphomas | ScFv-FcεRIγ | First |
| | receptor superfamily, | | | | |
| | member 8 | | | | |
| | (TNFRSF8; CD30); | | | | |
| | GenBank Accession | | | | |
| | Nos. NP_001234.3; | | | | |
| | NP_001268359.2; | | | | |
| CD30 | | | Hodgkin lymphoma | ScFv-CD3ζ | First |
| | | | | (EBV) | |
| CD33 | CD33 molecule | 167-169; | AML | ScFv-CD28- | Second |
| | GenBank Accession | | | CD3ζ | |
| | Nos. | | | | |
| | NP_001076087.1; | | | | |
| | NP_001171079.1; | | | | |
| | NP_001763.3 | | | | |
| CD33 | | | AML | ScFv-41BB- | Second |
| | | | | CD3ζ | |
| CD44v7/8 | CD44 molecule | 170-177 | Cervical carcinoma | ScFv-CD8- | Second |
| | (Indian blood group) | | | CD3ζ | |
| | GenBank Accession | | | | |
| | Nos. NP_000601.3; | | | | |
| | NP_001001389.1; | | | | |
| | NP_001001390.1; | | | | |
| | NP_001001391.1; | | | | |
| | NP_001001392.1; | | | | |
| | NP_001189484.1; | | | | |
| | NP_001189485.1; | | | | |
| | NP_001189486.1; | | | | |
| CEA | | | Breast cancer | ScFv-CD28- | Second |
| | | | | CD3ζ | |
| CEA | | | Colorectal cancer | ScFv-CD3ζ | First |
| CEA | | | Colorectal cancer | ScFv-FceRIγ | First |
| CEA | | | Colorectal cancer | ScFv-CD3ζ | First |
| CEA | | | Colorectal cancer | ScFv-CD28- | Second |
| | | | | CD3ζ | |
| CEA | | | Colorectal cancer | ScFv-CD28- | Second |
| | | | | CD3ζ | |
| EGP-2 | epithelial cell | 178 | Multiple | scFv-CD3ζ | First |
| | adhesion molecule | | malignancies | | |
| | (EPCAM) GenBank | | | | |
| | Accession No. | | | | |
| | NP_002345.2 | | | | |
| EGP-2 | | | Multiple | scFv-FcεRIγ | First |
| | | | malignancies | | |
| EGP-40 | epithelial cell | 178 | Colorectal cancer | scFv-FcεRIγ | First |
| | adhesion molecule | | | | |
| | (EPCAM); GenBank | | | | |
| | Accession No. | | | | |
| | NP_002345.2 | | | | |
| erb-B2 | erb-b2 receptor | 179-183 | Colorectal cancer | CD28/4-1BB- | Third |
| | tyrosine kinase 2 | | | CD3ζ | |
| | (ERBB2) GenBank | | | | |
| | Accession Nos. | | | | |
| | NP_001005862.1; | | | | |
| | NP_001276865.1; | | | | |
| | NP_001276866.1; | | | | |
| | NP_001276867.1; | | | | |
| | NP_004439.2; | | | | |
| erb-B2 | | | Breast and others | ScFv-CD28- | Second |
| | | | | CD3ζ | |
| erb-B2 | | | Breast and others | ScFv-CD28- | Second |
| | | | | CD3ζ | |
| | | | | (Influenza) | |
| erb-B2 | | | Breast and others | ScFv- | Second |
| | | | | CD28mut- | |
| | | | | CD3ζ | |
| erb-B2 | | | Prostate cancer | ScFv-FcεRIγ | First |
| erb-B 2, 3, 4 | erb-b2 receptor | 179-183 | Breast and others | Heregulin- | Second |
| | tyrosine kinase 3 | | | CD3ζ | |
| | GenBank Accession | | | | |
| | Nos. | | | | |
| | NP_001005915.1; | | | | |
| | NP_001973.2; and | | | | |
| | erb-b2 receptor | | | | |
| | tyrosine kinase 2 | | | | |
| | GenBank Accession | | | | |
| | Nos. | | | | |
| | NP_001005862.1; | | | | |
| | NP_001276865.1; | | | | |
| | NP_001276866.1; | | | | |
| | NP_001276867.1; | | | | |
| | NP_004439.2 | | | | |
| erb-B 2, 3, 4 | | | Breast and others | ScFv-CD3ζ | First |
| FBP | far upstream element | 186-187; | Ovarian cancer | ScFv-FcεRIγ | First |
| | (FUSE) binding | | | | |
| | protein 1 (FUBP1) | | | | |
| | GenBank Accession | | | | |
| | No. | | | | |
| | NP_001290362.1; | | | | |
| | NP_003893.2; | | | | |
| FBP | | | Ovarian cancer | ScFv-FcεRIγ | First |
| | | | | (alloantigen) | |
| Fetal | | | Rhabdomyosarcoma | ScFv-CD3ζ | First |
| acetylcholine | | | | | |
| receptor | | | | | |
| GD2 | | | Neuroblastoma | ScFv-CD28 | First |
| GD2 | | | Neuroblastoma | ScFv-CD3ζ | First |
| GD2 | | | Neuroblastoma | ScFv-CD3ζ | First |
| GD2 | | | Neuroblastoma | ScFv-CD28- | Third |
| | | | | OX40-CD3ζ | |
| GD2 | | | Neuroblastoma | ScFv-CD3ζ | First |
| | | | | (VZV) | |
| GD3 | Graves disease, | | Melanoma | ScFv-CD3ξ | First |
| | susceptibility to, X- | | | | |
| | linked (GRDX); | | | | |
| | Gene ID 117189 | | | | |
| GD3 | | | Melanoma | ScFv-CD3ξ | First |
| Her2/neu | erb-b2 receptor | 179-183 | Medulloblastoma | ScFv-CD3ξ | First |
| | tyrosine kinase 2 | | | | |
| | GenBank Accession | | | | |
| | Nos. | | | | |
| | NP_001005862.1; | | | | |
| | NP_001276865.1; | | | | |
| | NP_001276866.1; | | | | |
| | NP_001276867.1; | | | | |
| | NP_004439.2 | | | | |
| Her2/neu | | | Lung malignancy | ScFv-CD28- | Second |
| | | | | CD3ζ | |
| Her2/neu | | | Advanced | ScFv-CD28- | Second |
| | | | osteosarcoma | CD3ζ | |
| Her2/neu | | | Glioblastoma | ScFv-CD28- | Second |
| | | | | CD3ζ | |
| IL-13R-a2 | interleukin 13 | 189 | Glioma | IL-13-CD28- | Third |
| | receptor, alpha 2 | | | 4-1BB-CD3ζ | |
| | (IL13RA2); | | | | |
| | GenBank Accession | | | | |
| | No. | | | | |
| | NP_000631.1 | | | | |
| IL-13R-a2 | | | Glioblastoma | IL-13-CD3ζ | Second |
| IL-13R-a2 | | | Medulloblastoma | IL-13-CD3ζ | Second |
| KDR | kinase insert domain | 190 | Tumor | ScFv-FcεRIγ | First |
| | receptor; GenBank | | neovasculature | | |
| | Accession No. | | | | |
| | NP_002244.1 | | | | |
| k-light chain | NFKBIA nuclear | 191 | B-cell malignancies | ScFv-CD3ζ | First |
| | factor of kappa light | | | | |
| | polypeptide gene | | | | |
| | enhancer in B-cells | | | | |
| | inhibitor, alpha; | | | | |
| | GenBank Accession | | | | |
| | No. NP_065390.1 | | | | |
| k-light chain | | | (B-NHL, CLL) | ScFv-CD28- | Second |
| | | | | CD3ζ vs | |
| | | | | CD3ζ | |
| LeY | | | Carcinomas | ScFv-FcεRIγ | First |
| LeY | | | Epithelial derived | ScFv-CD28- | Second |
| | | | tumors | CD3ζ | |
| L1 cell adhesion | L1 cell adhesion | 194-197 | Neuroblastoma | ScFv-CD3ζ | First |
| molecule | molecule (L1CAM), | | | | |
| | GenBank Accession | | | | |
| | Nos. NP_000416.1; | | | | |
| | NP_001137435.1; | | | | |
| | NP_001265045.1; | | | | |
| | NP_076493.1; | | | | |
| MAGE-A1 | Melanoma antigen | 133 | Melanoma | ScFV-CD4- | Second |
| | family A1 | | | FcεRIγ | |
| | (MAGEA1), | | | | |
| | GenBank Accession | | | | |
| | No. NP_004979.3 | | | | |
| MAGE-A1 | | | Melanoma | ScFV-CD28- | Second |
| | | | | FcεRIγ | |
| Mesothelin | MSLN, GenBank | 198-200 | Various tumors | ScFv-CD28- | Second |
| | Accession No. | | | CD3ζ | |
| | NP_001170826.1; | | | | |
| | NP_005814.2; | | | | |
| | NP_037536.2; | | | | |
| Mesothelin | | | Various tumors | ScFv-41BB- | Second |
| | | | | CD3ζ | |
| Mesothelin | | | Various tumors | ScFv-CD28- | Third |
| | | | | 41BB-CD3ζ | |
| Murine CMV | | | Murine CMV | Ly49H-CD3ζ | Second |
| infected cells | | | | | |
| MUC1 (target | NP_001018016.1; | 201; | Breast, Ovary | ScFV-CD28- | Third |
| antigens are from | NP_001018017.1; | 202; | | OX40-CD3ζ | |
| the extracellular | NP_001037855.1; | 105; | | | |
| domains of the | NP_001037856.1; | 204; | | | |
| MUC1 protein) | NP_001037857.1; | 106; | | | |
| | NP_001037858.1; | 206; | | | |
| | NP_001191214.1; | 107; | | | |
| | NP_001191215.1; | 208; | | | |
| | NP_001191216.1; | 108; | | | |
| | NP_001191217.1; | 210; | | | |
| | NP_001191218.1; | 109; | | | |
| | NP_001191219.1; | 212; | | | |
| | NP_001191220.1; | 110; | | | |
| | NP_001191221.1; | 214; | | | |
| | NP_001191222.1; | 111; | | | |
| | NP_001191223.1; | 216; | | | |
| | NP_001191224.1; | 112; | | | |
| | NP_001191225.1; | 218; | | | |
| | NP_001191226.1; | 113; | | | |
| | NP_002447.4 | 220; | | | |
| NKG2D ligands | Ligands of GenBank | 221 | Various tumors | NKG2D- | First |
| | Accession No. | | | CD3ζ | |
| | NP_031386.2 such | | | | |
| | as MHC class I | | | | |
| | chain-related A and | | | | |
| | B proteins and UL- | | | | |
| | 16 binding proteins | | | | |
| Oncofetal antigen | trophoblast | 222-223 | Various tumors | ScFV-CD3ζ | First |
| (h5T4) | glycoprotein | | | (vaccination) | |
| | (TPBG), GenBank | | | | |
| | Accession Nos. | | | | |
| | NP_001159864.1 | | | | |
| | and NP_006661.1 | | | | |
| PSCA | prostate specific | 98 | Prostate carcinoma | ScFv-b2c- | Second |
| | membrane antigen | | | CD3ζ | |
| | (PSCA), GenBank | | | | |
| | Accession No. | | | | |
| | NP_005663.2 | | | | |
| PSMA | folate hydrolase | 225-229 | Prostate/tumor | ScFv-CD3ζ | First |
| | (prostate-specific | | vasculature | | |
| | membrane antigen) 1 | | | | |
| | (FOLH1); GenBank | | | | |
| | Accession No. | | | | |
| | NP_001014986.1; | | | | |
| | NP_001180400.1; | | | | |
| | NP_001180401.1; | | | | |
| | NP_001180402.1; | | | | |
| | NP_004467.1 | | | | |
| PSMA | | | Prostate/tumor | ScFv-CD28- | Second |
| | | | vasculature | CD3ζ | |
| PSMA | | | Prostate/tumor | ScFv-CD3ζ | First |
| | | | vasculature | | |
| TAA targeted by | | | Various tumors | FceRI-CD28- | Third |
| mAb IgE | | | | CD3ζ (+ a- | |
| | | | | TAA IgE | |
| | | | | mAb) | |
| TAG-72 | | | Adenocarcinomas | scFv-CD3ζ | First |
| VEGF-R2 | Also known as | | Tumor | scFv-CD3ζ | First |
| | “KDR” | | neovasculature | | |

Table 15.

[0218] Tables 16-19 provide additional tumor antigens which can be used according to some embodiments of the invention.

TABLE 16
Tumor Antigens Resulting from Mutations

| | | | HLA | | | Lymphocyte |
|---|---|---|---|---|---|---|
| | | | Frequency^{b} | | SEQ ID | Stimulation |
| Gene/protein | Tumor | HLA^{a} | (%) | Peptide^{c} | NO: | Method |
| alpha-actinin-4 | lung | A2 | 44 | FIASNGVKLV | 475 | autologous |
| | carcinoma | | | | | tumor |
| | | | | | | cells |
| ARTC1 | melanoma | DR1 | 18 | YSVYFNLPADTIYTN^{h} | 476 | autologous |
| | | | | | | tumor |
| | | | | | | cells |
| -ABL BCR | chronic | A2 | 44 | SSKALQRPV | 477 | peptide |
| fusion protein | myeloid | B8 | 14 | GFKQSSKAL | 478 | peptide |
| (b3a2) | leukemia | DR4 | 24 | ATGFKQSSKALQRPV | 479 | peptide |
| | | | | AS | | |
| | | DR9 | 3 | ATGFKQSSKALQRPV | 480 | peptide |
| | | | | AS | | |
| B-RAF | melanoma | DR4 | 24 | EDLTVKIGDFGLATE | 481 | peptide |
| | | | | KSRWSGSHQFEQLS | | |
| CASP-5 | colorectal, | A2 | 44 | FLIIWQNTM^{g} | 482 | peptide |
| | gastric, and | | | | | |
| | endometrial | | | | | |
| | carcinoma | | | | | |
| CASP-8 | head and | B35 | 20 | FPSDSWCYF | 483 | autologous |
| | neck | | | | | tumor |
| | squamous | | | | | cell |
| | cells | | | | | |
| | carcinoma | | | | | |
| beta-catenin | melanoma | A24 | 20 | SYLDSGIHF | 484 | autologous |
| | | | | | | tumor |
| | | | | | | cells |
| Cdc27 | melanoma | DR4 | 24 | FSWAMDLDPKGA^{e} | 485 | autologous |
| | | | | | | tumor |
| | | | | | | cells |
| CDK4 | melanoma | A2 | 44 | ACDPHSGHFV | 486 | autologous |
| | | | | | | tumor |
| | | | | | | cells |
| CDKN2A | melanoma | A11 | 13 | AVCPWTWLR^{a} | 487 | autologous |
| | | | | | | tumor |
| | | | | | | cells |
| CLPP | melanoma | A2 | 44 | ILDKVLVHL | 488 | autologous |
| | | | | | | tumor |
| | | | | | | cells |
| COA-1 | colorectal | DR4 | 24 | TLYQDDTLTLQAAG^{e} | 489 | autologous |
| | carcinoma | | | | | tumor |
| | | | | | | cells |
| | | DR13 | 19 | TLYQDDTLTLQAAG^{e} | 490 | autologous |
| | | | | | | tumor |
| | | | | | | cells |
| -can fusion dek | myeloid | DR53 | 49 | TMKQICKKEIRRLHQY | 491 | peptide |
| protein | leukemia | | | | | |
| EFTUD2 | melanoma | A3 | 22 | KILDAVVAQK | 492 | autologous |
| | | | | | | tumor |
| | | | | | | cells |
| Elongation | lung | A68 | 8 | ETVSEQSNV | 493 | autologous |
| factor 2 | squamous | | | | | tumor |
| | CC | | | | | cells |
| -AML1 ETV6 | acute | A2 | 44 | RIAECILGM | 494 | peptide |
| fusion protein | lymphoblastic | DP5 | 3 | IGRIAECILGMNPSR | 495 | peptide |
| | leukemia | DP17 | 1 | IGRIAECILGMNPSR | 496 | peptide |
| FLT3-ITD | acute | A1 | 26 | YVDFREYEYY | 497 | peptide |
| | myelogenous | | | | | |
| | leukemia | | | | | |
| FN1 | melanoma | DR2 | 25 | MIFEKHGFRRTTPP | 498 | autologous |
| | | | | | | tumor |
| | | | | | | cells |
| GPNMB | melanoma | A3 | 22 | TLDWLLQTPK | 499 | autologous |
| | | | | | | tumor |
| | | | | | | cells |
| -LDLR | melanoma | DR1 | 18 | WRRAPAPGA | 500 | autologous |
| fucosyltransferase | | | | | | tumor |
| AS fusion | | | | | | cells |
| protein | | DR1 | 18 | PVTWRRAPA | 501 | autologous |
| | | | | | | tumor |
| | | | | | | cells |
| ^{d}HLA-A2 | renal cell | | | | 502 | autologous |
| | carcinoma | | | | | tumor |
| | | | | | | cells |
| ^{d}HLA-A11 | melanoma | | | | 503 | autologous |
| | | | | | | tumor |
| | | | | | | cells |
| hsp70-2 | renal cell | A2 | 44 | SLFEGIDIYT | 504 | autologous |
| | carcinoma | | | | | tumor |
| | | | | | | cells |
| | bladder | B44 | 21 | AEPINIQTW | 505 | autologous |
| | tumor | | | | | tumor |
| | | | | | | cells |
| MART2 | melanoma | A1 | 26 | FLEGNEVGKTY | 506 | autologous |
| | | | | | | tumor |
| | | | | | | cells |
| ME1 | non-small | A2 | 44 | FLDEFMEGV | 507 | autologous |
| | cell lung | | | | | tumor |
| | carcinoma | | | | | cells |
| ^{f}MUM-1 | melanoma | B44 | 21 | EEKLIVVLF | 508 | autologous |
| | | | | | | tumor |
| | | | | | | cells |
| MUM-2 | melanoma | B44 | 21 | SELFRSGLDSY | 509 | autologous |
| | | | | | | tumor |
| | | | | | | cells |
| | | Cw6 | 18 | FRSGLDSYV | 510 | autologous |
| | | | | | | tumor |
| | | | | | | cells |
| MUM-3 | melanoma | A68 | 8 | EAFIQPITR | 511 | autologous |
| | | | | | | tumor |
| | | | | | | cells |
| neo-PAP | melanoma | DR7 | 25 | RVIKNSIRLTL^{e} | 512 | autologous |
| | | | | | | tumor |
| | | | | | | cells |
| Myosin class I | melanoma | A3 | 22 | KINKNPKYK | 513 | expansion |
| | | | | | | of TIL |
| | | | | | | with IL-2 |
| NFYC | lung | B52 | 5 | QQITKTEV | 514 | autologous |
| | squamous | | | | | tumor |
| | cell | | | | | cells |
| | carcinoma | | | | | |
| OGT | colorectal | A2 | 44 | SLYKFSPFPL^{g} | 515 | peptide |
| | carcinoma | | | | | |
| OS-9 | melanoma | B44 | 21 | KELEGILLL | 516 | autologous |
| | | | | | | tumor |
| | | | | | | cells |
| p53 | head and | A2 | 44 | VVPCEPPEV | 517 | peptide |
| | neck | | | | | |
| | squamous | | | | | |
| | cell | | | | | |
| | carcinoma | | | | | |
| -RARalphapml | promyelocytic | DR11 | 25 | NSNHVASGAGEAAIE | 518 | peptide |
| fusion protein | leukemia | | | TQSSSSEEIV | | |
| PRDX5 | melanoma | A2 | 44 | LLLDDLLVSI | 519 | peptide |
| PTPRK | melanoma | DR10 | 3 | PYYFAAELPPRNLPEP | 520 | autologous |
| | | | | | | tumor |
| | | | | | | cells |
| K-ras | pancreatic | B35 | 20 | VVVGAVGVG | 521 | peptide |
| | adenocarcinoma | | | | | |
| N-ras | melanoma | A1 | 26 | ILDTAGREEY | 522 | autologous |
| | | | | | | tumor |
| | | | | | | cells |
| RBAF600 | melanoma | B7 | 17 | RPHVPESAF | 523 | autologous |
| | | | | | | tumor |
| | | | | | | cells |
| SIRT2 | melanoma | A3 | 22 | KIFSEVTLK | 524 | autologous |
| | | | | | | tumor |
| | | | | | | cells |
| SNRPD1 | melanoma | B38 | 5 | SHETVIIEL | 525 | autologous |
| | | | | | | tumor |
| | | | | | | cells |
| -SSX1 or -SYT | sarcoma | B7 | 17 | QRPYGYDQIM | 526 | peptide |
| SSX2 fusion | | | | | | |
| protein | | | | | | |
| TGF-betaRII | colorectal | A2 | 44 | RLSSCVPVA^{g} | 527 | peptide |
| | carcinoma | | | | | |
| Triosephosphate | melanoma | DR1 | 18 | GELIGILNAAKVPAD | 528 | autologous |
| isomerase | | | | | | tumor |
| | | | | | | cells |

Table 6:.
^{b}Frequency in Caucasians, based on (1) Marsh SGE, Parham P, Barber LD. The HLA Factsbook (Academic Press, 2000) for HLA-A, B, C, and DR, and (2) Colombani J. HLA, Fonctions immunitaires et applications medicales (John Libbey Eurotext, 1993) for HLA-DP and DR.
^{c}The residues modified by the mutation are indicated in red.
^{d}The mutation affects the HLA gene itself.
^{e}The mutation is not located in the region encoding the peptide.
^{f}Link to GenBank.
^{g}Frameshift product.
^{h}The mutation creates a start codon (ATG) that opens an alternative ORF encoding the antigenic peptide. This peptide is recognized by regulatory T cells (Tregs).
ⁱIt was reported that this peptide is not naturally processed (Popovic 2011).

TABLE 17
Shared Tumor-Specific Antigens

| | | HLA | | SEQ | Lymphocyte |
|---|---|---|---|---|---|
| | | Frequency^{b} | | ID | Stimulation |
| Gene | HLA | (%) | Peptide | NO: | Method |
| BAGE-1 | Cw16 | 7 | AARAVFLAL | 529 | autologous |
| | | | | | tumor cells |
| Cyclin-A1 | A2 | 44 | FLDRFLSCM | 530 | peptide |
| | A2 | 44 | SLIAAAAFCLA | 531 | peptide |
| GAGE- | Cw6 | 18 | YRPRPRRY | 532 | autologous |
| 1.2.8 | | | | | tumor cells |
| GAGE- | A29 | 6 | YYWPRPRRY | 533 | autologous |
| 3.4.5.6.7 | | | | | tumor cells |
| ^{f}GnTV | A2 | 44 | VLPDVFIRC(V) | 534 | autologous |
| | | | | | tumor cells |
| HERV-K- | A2 | 44 | MLAVISCAV | 535 | autologous |
| MEL | | | | | tumor cells |
| KK-LC-1 | B15 | 13 | RQKRILVNL | 536 | autologous |
| | | | | | tumor cells |
| KM-HN-1 | A24 | 20 | NYNNFYRFL | 537 | peptide |
| | A24 | 20 | EYSKECLKEF | 538 | peptide |
| | A24 | 20 | EYLSLSDKI | 539 | peptide |
| LAGE-1 | A2 | 44 | MLMAQEALAFL | 540 | autologous |
| | | | | | tumor cells |
| | A2 | 44 | SLLMWITQC | 541 | peptide |
| | A31 | 5 | LAAQERRVPR | 542 | autologous |
| | | | | | tumor cells |
| | A68 | 8 | ELVRRILSR | 543 | adenovirus- |
| | | | | | dendritic |
| | | | | | cells |
| | B7 | 17 | APRGVRMAV | 544 | adenovirus- |
| | | | | | APC |
| | DP4 | 75 | SLLMWITQCFLPVF | 545 | peptide |
| | DR3 | 21 | QGAMLAAQERRVPRAAEVPR | 546 | protein |
| | DR4 | 24 | AADHRQLQLSISSCLQQL | 547 | protein |
| | DR11 | 25 | CLSRRPWKRSWSAGSCPGMP | 548 | peptide |
| | | | HL | | |
| | DR12 | 5 | CLSRRPWKRSWSAGSCPGMP | 549 | peptide |
| | | | HL | | |
| | DR13 | 19 | ILSRDAAPLPRPG | 550 | autologous |
| | | | | | tumor cells |
| | DR15 | 20 | AGATGGRGPRGAGA | 551 | protein |
| MAGE-A1 | A1 | 26 | EADPTGHSY | 552 | autologous |
| | | | | | tumor cells |
| | A2 | 44 | KVLEYVIKV | 553 | peptide |
| | A3 | 22 | SLFRAVITK | 554 | poxvirus- |
| | | | | | dendritic |
| | | | | | cells^{c} |
| | A68 | 8 | EVYDGREHSA | 555 | poxvirus- |
| | | | | | dendritic |
| | | | | | cells |
| | B7 | 17 | RVRFFFPSL | 556 | poxvirus- |
| | | | | | dendritic |
| | | | | | cells |
| | B35 | 20 | EADPTGHSY | 557 | poxvirus- |
| | | | | | dendritic |
| | | | | | cells |
| | B37 | 3 | REPVTKAEML | 558 | autologous |
| | | | | | tumor cells |
| | B44 | 21 | KEADPTGHSY | 559 | poxvirus- |
| | | | | | dendritic |
| | | | | | cells |
| | B53 | 2 | DPARYEFLW | 560 | poxvirus- |
| | | | | | dendritic |
| | | | | | cells |
| | B57 | 8 | ITKKVADLVGF | 561 | ALVAC- |
| | | | | | dendritic |
| | | | | | cells |
| | Cw2 | 10 | SAFPTTINF | 562 | poxvirus- |
| | | | | | dendritic |
| | | | | | cells |
| | Cw3 | 17 | SAYGEPRKL | 563 | poxvirus- |
| | | | | | dendritic |
| | | | | | cells |
| | Cw7 | 41 | RVRFFFPSL | 564 | peptide |
| | Cw16 | 7 | SAYGEPRKL | 565 | autologous |
| | | | | | tumor cells |
| | DP4 | 75 | TSCILESLFRAVITK | 566 | peptide |
| | DP4 | 75 | PRALAETSYVKVLEY | 567 | peptide |
| | DR13 | 19 | FLLLKYRAREPVTKAE | 568 | protein |
| | DR15 | 20 | EYVIKVSARVRF | 569 | protein |
| MAGE-A2 | A2 | 44 | YLQLVFGIEV | 570 | peptide |
| | A24 | 20 | EYLQLVFGI | 571 | peptide |
| | B37 | 3 | REPVTKAEML | 572 | autologous |
| | | | | | tumor cells |
| | Cw7 | 41 | EGDCAPEEK | 573 | lentivirus- |
| | | | | | dendritic |
| | | | | | cells |
| | DR13 | 19 | LLKYRAREPVTKAE | 574 | protein |
| MAGE-A3 | A1 | 26 | EVDPIGHLY | 575 | autologous |
| | | | | | tumor cells |
| | A2 | 44 | FLWGPRALV^{d} | 576 | peptide |
| | A2 | 44 | KVAELVHFL | 577 | peptide |
| | A24 | 20 | TFPDLESEF | 578 | peptide |
| | A24 | 20 | VAELVHFLL | 579 | peptide |
| | B18 | 6 | MEVDPIGHLY | 580 | adeno- |
| | | | | | dendritic |
| | | | | | cells |
| | B35 | 20 | EVDPIGHLY | 581 | poxvirus- |
| | | | | | dendritic |
| | | | | | cells |
| | B37 | 3 | REPVTKAEML | 582 | autologous |
| | | | | | tumor cells |
| | B40 | 6 | AELVHFLLLⁱ | 583 | adeno- |
| | | | | | dendritic |
| | | | | | cells |
| | B44 | 21 | MEVDPIGHLY | 584 | peptide |
| | B52 | 5 | WQYFFPVIF | 585 | retrovirus- |
| | | | | | dendritic |
| | | | | | cells^{h} |
| | Cw7 | 41 | EGDCAPEEK | 586 | lentivirus- |
| | | | | | dendritic |
| | | | | | cells |
| | DP4 | 75 | KKLLTQHFVQENYLEY | 587 | protein |
| | DP4 | 75 | RKVAELVHFLLLKYR | 588 | peptide |
| | DQ6 | 63 | KKLLTQHFVQENYLEY | 589 | peptide |
| | DR1 | 18 | ACYEFLWGPRALVETS | 590 | protein |
| | DR4 | 24 | RKVAELVHFLLLKYR | 591 | peptide |
| | DR4 | 24 | VIFSKASSSLQL | 592 | peptide |
| | DR7 | 25 | VIFSKASSSLQL | 593 | peptide |
| | DR7 | 25 | VFGIELMEVDPIGHL | 594 | peptide |
| | DR11 | 25 | GDNQIMPKAGLLIIV | 595 | peptide |
| | DR11 | 25 | TSYVKVLHHMVKISG | 596 | protein |
| | DR13 | 19 | RKVAELVHFLLLKYRA | 597 | protein |
| | DR13 | 19 | FLLLKYRAREPVTKAE | 598 | protein |
| MAGE-A4 | A1 | 26 | EVDPASNTY^{j} | 599 | peptide after |
| | | | | | tetramer |
| | | | | | sorting |
| | 42 | 44 | GVYDGREHTV | 600 | adeno- |
| | | | | | dendritic |
| | | | | | cells |
| | A24 | 20 | NYKRCFPVI | 601 | peptide |
| | B37 | 3 | SESLKMIF | 602 | poxvirus- |
| | | | | | dendritic |
| | | | | | cells |
| MAGE-A6 | A34 | 1 | MVKISGGPR | 603 | autologous |
| | | | | | tumor cells |
| | B35 | 20 | EVDPIGHVY | 604 | autologous |
| | | | | | tumor cells |
| | B37 | 3 | REPVTKAEML | 605 | autologous |
| | | | | | tumor cells |
| | Cw7 | 41 | EGDCAPEEK | 606 | lentivirus- |
| | | | | | dendritic |
| | | | | | cells |
| | Cw16 | 7 | ISGGPRISY | 607 | autologous |
| | | | | | tumor cells |
| | DR13 | 19 | LLKYRAREPVTKAE | 608 | protein |
| MAGE-A9 | A2 | 44 | ALSVMGVYV | 609 | peptide |
| MAGE- | A2 | 44 | GLYDGMEHL^{l} | 610 | autologous |
| A10 | | | | | tumor cells |
| | B53 | 2 | DPARYEFLW | 611 | poxvirus- |
| | | | | | dendritic |
| | | | | | cells |
| MAGE- | A2^{g} | 44 | FLWGPRALV^{e} | 612 | peptide |
| A12^{m} | Cw7 | 41 | VRIGHLYIL | 613 | autologous |
| | | | | | tumor cells |
| | Cw7 | 41 | EGDCAPEEK | 614 | lentivirus- |
| | | | | | dendritic |
| | | | | | cells |
| | DP4 | 75 | REPFTKAEMLGSVIR | 615 | peptide |
| | DR13 | 19 | AELVHFLLLKYRAR | 616 | protein |
| MAGE-C1 | A2 | 44 | ILFGISLREV | 617 | peptide |
| | A2 | 44 | KVVEFLAML | 529 | peptide |
| | DQ6 | 63 | SSALLSIFQSSPE | 530 | peptide |
| | DQ6 | 63 | SFSYTLLSL | 531 | peptide |
| | DR15 | 20 | VSSFFSYTL | 532 | peptide |
| MAGE-C2 | A2 | 44 | LLFGLALIEV | 533 | autologous |
| | | | | | tumor cells |
| | A2 | 44 | ALKDVEERV | 534 | autologous |
| | | | | | tumor cells |
| | B44 | 21 | SESIKKKVL | 535 | autologous |
| | | | | | tumor cells |
| | B57 | 8 | ASSTLYLVF | 536 | autologous |
| | | | | | tumor cells |
| | DR15 | 20 | SSTLYLVFSPSSFST | 537 | peptide |
| ^{k}mucin | | | PDTRPAPGSTAPPAHGVTSA | 538 | transfected B |
| | | | | | cells |
| NA88-A | B13 | 6 | QGQHFLQKV | 539 | tumor- |
| | | | | | infiltrating |
| | | | | | lymphocytes |
| NY-ESO-1/ | A2 | 44 | SLLMWITQC | 540 | autologous |
| LAGE-2 | | | | | tumor cells |
| | A2 | 44 | MLMAQEALAFL | 541 | autologous |
| | | | | | tumor cells |
| | A24 | 20 | YLAMPFATPME | 542 | peptide |
| | A31 | 5 | ASGPGGGAPR | 543 | autologous |
| | | | | | tumor cells |
| | A31 | 5 | LAAQERRVPR | 544 | autologous |
| | | | | | tumor cells |
| | A68 | 8 | TVSGNILTIR | 545 | mRNA- |
| | | | | | transfected |
| | | | | | cells |
| | B7 | 17 | APRGPHGGAASGL | 546 | peptide |
| | B35 | 20 | MPFATPMEA | 547 | autologous |
| | | | | | tumor cells |
| | B49 | | KEFTVSGNILTI | 548 | mRNA- |
| | | | | | transfected |
| | | | | | cells |
| | B51 | 12 | MPFATPMEA | 549 | adenovirus- |
| | | | | | APC |
| | B52 | 5 | FATPMEAEL | 550 | peptide |
| | C12 | 12 | FATPMEAELAR | 551 | peptide |
| | Cw3 | 17 | LAMPFATPM | 552 | adenovirus- |
| | | | | | PBMC |
| | Cw6 | 18 | ARGPESRLL | 553 | adenovirus- |
| | | | | | PBMC^{d} |
| | DP4 | 75 | SLLMWITQCFLPVF | 554 | peptide |
| | DP4 | 75 | LLEFYLAMPFATPMEAELAR | 555 | peptide |
| | | | RSLAQ | | |
| | DR1 | 18 | LLEFYLAMPFATPMEAELAR | 556 | peptide |
| | | | RSLAQ | | |
| | DR1 | 18 | EFYLAMPFATPM | 557 | protein |
| | DR1 | 18 | PGVLLKEFTVSGNILTIRLTA | 558 | peptide |
| | | | ADHR | | |
| | DR2 | 25 | RLLEFYLAMPFA | 559 | protein |
| | DR3 | 21 | QGAMLAAQERRVPRAAEVPR | 560 | protein |
| | DR4 | 24 | PFATPMEAELARR | 561 | peptide |
| | DR4 | 24 | PGVLLKEFTVSGNILTIRLT | 562 | peptide and |
| | | | | | protein |
| | DR4 | 24 | VLLKEFTVSG | 563 | peptide |
| | DR4 | 24 | AADHRQLQLSISSCLQQL | 564 | protein |
| | DR4 | 24 | LLEFYLAMPFATPMEAELAR | 565 | peptide |
| | | | RSLAQ | | |
| | DR52b | 25 | LKEFTVSGNILTIRL | 566 | protein |
| | DR7 | 25 | PGVLLKEFTVSGNILTIRLTA | 567 | peptide |
| | | | ADHR | | |
| | DR7 | 25 | LLEFYLAMPFATPMEAELAR | 568 | peptide |
| | | | RSLAQ | | |
| | DR8 | 4 | KEFTVSGNILT | 569 | peptide |
| | DR9 | 3 | LLEFYLAMPFATPM | 570 | peptide |
| | DR15 | 20 | AGATGGRGPRGAGA | 571 | protein |
| SAGE | A24 | 20 | LYATVIHDI | 572 | peptide |
| Sp17 | A1 | 26 | ILDSSEEDK | 573 | protein |
| SSX-2 | A2 | 44 | KASEKIFYV | 574 | autologous |
| | | | | | tumor cells |
| | DP1 | 14 | EKIQKAFDDIAKYFSK | 575 | peptide |
| | DR1 | 18 | FGRLQGISPKI | 576 | peptide |
| | DR3 | 21 | WEKMKASEKIFYVYMKRK | 577 | peptide |
| | DR4 | 24 | KIFYVYMKRKYEAMT | 578 | peptide] |
| | DR11 | 25 | KIFYVYMKRKYEAM | 579 | protein |
| SSX-4 | DP10 | 2 | INKTSGPKRGKHAWTHRLRE | 580 | peptide |
| | DR3 | 21 | YFSKKEWEKMKSSEKIVYVY | 581 | peptide |
| | DR8 | 4 | MKLNYEVMTKLGFKVTLPPF | 582 | peptide |
| | DR8 | 4 | KHAWTHRLRERKQLVVYEEI | 583 | peptide |
| | DR11 | 25 | LGFKVTLPPFMRSKRAADFH | 584 | peptide |
| | DR15 | 20 | KSSEKIVYVYMKLNYEVMTK | 585 | peptide |
| | DR52 | 41 | KHAWTHRLRERKQLVVYEEI | 586 | peptide |
| TAG-1 | A2 | 44 | SLGWLFLLL | 587 | peptide |
| | B8 | 14 | LSRLSNRLL | 588 | peptide |
| TAG-2 | B8 | 14 | LSRLSNRLL | 589 | peptide |
| TRAG-3 | DR1 | 18 | CEFHACWPAFTVLGE | 590 | peptide |
| | DR4 | 24 | CEFHACWPAFTVLGE | 591 | peptide |
| | DR7 | 25 | CEFHACWPAFTVLGE | 592 | peptide |
| -TRP2 | A68 | 8 | EVISCKLIKR | 593 | autologous |
| INT2^{g} | | | | | tumor cells |
| XAGE- | A2 | 44 | RQKKIRIQL | 594 | peptide |
| 1b/GAGED | DR4 | 24 | HLGSRQKKIRIQLRSQ | 595 | peptide |
| 2a | DR9 | 3 | CATWKVICKSCISQTPG | 596 | autologous |
| | | | | | tumor cells |

^{b}Frequency in Caucasians, based on (1) Marsh SGE, Parham P, Barber LD. The HLA Factsbook (Academic Press, 2000) for HLA-A, B, C, and DR, and (2) Colombani J. HLA, Fonctions immunitaires et applications médicales (John Libbey Eurotext, 1993) for HLA-DP and DR.
^{c}ALVAC recombinant poxvirus carrying the entire gene were used to infect dendritic cells.
^{d}Only processed by the intermediate proteasome β5i (Guillaume, 2010).
^{e}Same peptide as MAGE-A3/A2 (aa 271-279).
^{f}Aberrant transcript of N-acetyl glucosaminyl transferase V (GnTV) that is found only in melanomas.
^{g}Incompletely spliced transcript found only in melanomas.
^{h}Retrovirus carrying the entire gene were used to infect dendritic cells.
ⁱThe processing of this peptide requires the immunoproteasome.
^{j}This peptide is encoded by allele MAGE-4a, which is expressed in one third of MAGE-4 positive tumor samples. The other allele, namely MAGE-4b, encodes peptide EVDPTSNTY.
^{k}MHC-unrestricted recognition by CTL of a repeated motif that is unmasked in tumors due to mucin underglycosylation. Mucin underglycosylation also occurs in breast duct epithelial cells during lactation, but only at the extracellular apical surface, which is not accessible to T cells.
^{l}Only processed by the intermediate proteasome β1iβ51 (Guillaume, 2010).
^{m}Not only expressed in testis but also in brain.

TABLE 18
Differentiation Antigens

| | | | HLA | | | Lymphocyte |
|---|---|---|---|---|---|---|
| Gene/ | | | Frequency^{b} | | SEQ ID | Stimulation |
| protein | Tumor | HLA^{a} | (%) | Peptide | NO: | Method |
| CEA | gut | A2 | 44 | YLSGANLNL^{g} | 597 | peptide |
| | carcinoma | A2 | 44 | IMIGVLVGV | 598 | peptide |
| | | A2 | 44 | GVLVGVALI | 599 | peptide |
| | | A3 | 22 | HLFGYSWYK | 600 | peptide |
| | | A24 | 20 | QYSWFVNGTF | 601 | peptide |
| | | A24 | 20 | TYACFVSNL | 602 | peptide |
| | | DR3 | 21 | AYVCGIQNSVSANRS | 603 | peptide |
| | | DR4 | 24 | DTGFYTLHVIKSDLVNEE | 604 | peptide |
| | | | | ATGQFRV | | |
| | | DR4 | 24 | YSWRINGIPQQHTQV | 605 | peptide |
| | | DR7 | 25 | TYYRPGVNLSLSC | 606 | peptide |
| | | DR7 | 25 | EIIYPNASLLIQN | 607 | peptide |
| | | DR9 | 3 | YACFVSNLATGRNNS | 608 | peptide |
| | | DR11 | 25 | LWWVNNQSLPVSP | 609 | peptide |
| | | DR13 | 19 | LWWVNNQSLPVSP | 610 | peptide |
| | | DR14 | 6 | LWWVNNQSLPVSP | 611 | peptide |
| | | DR14 | 6 | EIIYPNASLLIQN | 612 | peptide |
| | | DR14 | 6 | NSIVKSITVSASG | 613 | peptide |
| gp100/ | melanoma | A2 | 44 | KTWGQYWQV | 614 | autologous |
| Pmel17 | | | | | | tumor |
| | | | | | | cells |
| | | A2 | 44 | (A)MLGTHTMEV | 615 | peptide |
| | | A2 | 44 | ITDQVPFSV | 616 | autologous |
| | | | | | | tumor |
| | | | | | | cells |
| | | A2 | 44 | YLEPGPVTA | 617 | autologous |
| | | | | | | tumor |
| | | | | | | cells |
| | | A2 | 44 | LLDGTATLRL | 618 | autologous |
| | | | | | | tumor |
| | | | | | | cells |
| | | A2 | 44 | VLYRYGSFSV | 619 | autologous |
| | | | | | | tumor |
| | | | | | | cells |
| | | A2 | 44 | SLADTNSLAV | 620 | peptide |
| | | A2 | 44 | RLMKQDFSV | 621 | autologous |
| | | | | | | tumor |
| | | | | | | cells |
| | | A2 | 44 | RLPRIFCSC | 622 | autologous |
| | | | | | | tumor |
| | | | | | | cells |
| | | A3 | 22 | LIYRRRLMK | 623 | autologous |
| | | | | | | tumor |
| | | | | | | cells |
| | | A3 | 22 | ALLAVGATK | 624 | autologous |
| | | | | | | tumor |
| | | | | | | cells |
| | | A3 | 22 | IALNFPGSQK | 625 | peptide |
| | | A3 | 22 | RSYVPLAHR | 626 | autologous |
| | | | | | | tumor |
| | | | | | | cells |
| | | A3 | 22 | ALNFPGSQK | 627 | peptide |
| | | A11 | 13 | ALNFPGSQK | 628 | peptide |
| | | A24 | 20 | VYFFLPDHL | 629 | autologous |
| | | | | | | tumor |
| | | | | | | cells |
| | | A32 | 8 | RTKQLYPEW | 630 | autologous |
| | | | | | | tumor |
| | | | | | | cells |
| | | A68 | 8 | HTMEVTVYHR | 631 | autologous |
| | | | | | | tumor |
| | | | | | | cells |
| | | B7 | 17 | SSPGCQPPA | 632 | autologous |
| | | | | | | tumor |
| | | | | | | cells |
| | | B35 | 20 | VPLDCVLYRY | 633 | autologous |
| | | | | | | tumor |
| | | | | | | cells |
| | | B35 | 20 | LPHSSSHWL | 634 | autologous |
| | | | | | | tumor |
| | | | | | | cells |
| | | Cw8 | —^{c} | SNDGPTLI | 635 | autologous |
| | | | | | | tumor |
| | | | | | | cells |
| | | DQ6 | 63 | GRAMLGTHTMEVTVY | 636 | peptide |
| | | DR4 | 24 | WNRQLYPEWTEAQRLD | 637 | peptide |
| | | DR7 | 25 | TTEWVETTARELPIPEPE | 638 | protein |
| | | DR7 | 25 | TGRAMLGTHTMEVTVYH | 639 | retrovirus - |
| | | | | | | dendritic |
| | | | | | | cells |
| | | DR53 | 49 | GRAMLGTHTMEVTVY | 640 | peptide |
| mammaglobin-A | breast | A3 | 22 | PLLENVISK | 641 | peptide |
| | cancer | | | | | |
| Melan-A/ | melanoma | A2 | 44 | (E)AAGIGILTV | 642 | autologous |
| MART-1 | | | | | | tumor |
| | | | | | | cells |
| | | A2 | 44 | ILTVILGVL | 643 | autologous |
| | | | | | | tumor |
| | | | | | | cells |
| | | B35 | 20 | EAAGIGILTV | 644 | autologous |
| | | | | | | tumor |
| | | | | | | cells |
| | | B45 | 2 | AEEAAGIGIL(T) | 645 | autologous |
| | | | | | | tumor |
| | | | | | | cells |
| | | Cw7 | 41 | RNGYRALMDKS | 646 | peptide |
| | | DP5 | 3 | YTTAEEAAGIGILTVILGV | 647 | peptide |
| | | | | LLLIGCWYCRR | | |
| | | DQ6 | 63 | EEAAGIGILTVI | 648 | peptide |
| | | DR1 | 18 | AAGIGILTVILGVL | 649 | peptide |
| | | DR1 | 18 | APPAYEKLpSAEQ^{f} | 650 | peptide |
| | | DR3 | 21 | EEAAGIGILTVI | 651 | peptide |
| | | DR4 | 24 | RNGYRALMDKSLHVGTQ | 652 | peptide |
| | | | | CALTRR | | |
| | | DR11 | 25 | MPREDAHFIYGYPKKGHG | 653 | peptide |
| | | | | HS | | |
| | | DR52 | 41 | KNCEPVVPNAPPAYEKLS | 654 | peptide |
| | | | | AE | | |
| NY-BR-1 | breast | A2 | 44 | SLSKILDTV | 655 | peptide |
| | cancer | | | | | |
| OA1 | melanoma | A24 | 20 | LYSACFWWL | 656 | peptide |
| PAP | prostate | A2 | 44 | FLFLLFFWL | 657 | peptide |
| | cancer | A2 | 44 | TLMSAMTNL | 658 | peptide |
| | | A2 | 44 | ALDVYNGLL | 659 | peptide |
| PSA | prostate | A2 | 44 | FLTPKKLQCV | 660 | peptide |
| | carcinoma | A2 | 44 | VISNDVCAQV | 661 | peptide |
| RAB38/ | melanoma | A2 | 44 | VLHWDPETV | 662 | peptide |
| NY- | | | | | | |
| MEL-1 | | | | | | |
| TRP-1/ | melanoma | A31 | 5 | MSLQRQFLR | 663 | autologous |
| gp75 | | | | | | tumor |
| | | | | | | cells |
| | | DR4 | 24 | ISPNSVFSQWRVVCDSLED | 664 | peptide |
| | | | | YD | | |
| | | DR15 | 20 | SLPYWNFATG | 665 | autologous |
| | | | | | | tumor |
| | | | | | | cells |
| | | DR17 | 21 | SQWRVVCDSLEDYDT | 666 | peptide |
| TRP-2 | melanoma | A2 | 44 | SVYDFFVWL | 667 | peptide |
| | | A2 | 44 | TLDSQVMSL | 668 | peptide |
| | | A31 | 5 | LLGPGRPYR | 669 | autologous |
| | | | | | | tumor |
| | | | | | | cells |
| | | A33 | 5 | LLGPGRPYR | 670 | autologous |
| | | | | | | tumor |
| | | | | | | cells |
| | | Cw8 | —^{c} | ANDPIFVVL | 671 | autologous |
| | | | | | | tumor |
| | | | | | | cells |
| | | DR3 | 21 | QCTEVRADTRPWSGP | 672 | peptide |
| | | DR15 | 20 | ALPYWNFATG | 673 | autologous |
| | | | | | | tumor |
| | | | | | | cells |
| tyrosinase | melanoma | A1 | 26 | KCDICTDEY | 674 | autologous |
| | | | | | | tumor |
| | | | | | | cells |
| | | A1 | 26 | SSDYVIPIGTY | 675 | autologous |
| | | | | | | tumor |
| | | | | | | cells |
| | | A2 | 44 | MLLAVLYCL | 676 | autologous |
| | | | | | | tumor |
| | | | | | | cells |
| | | A2 | 44 | CLLWSFQTSA | 677 | peptide |
| | | A2 | 44 | YMDGTMSQV | 678 | autologous |
| | | | | | | tumor |
| | | | | | | cells |
| | | A24 | 20 | AFLPWHRLF | 679 | autologous |
| | | | | | | tumor |
| | | | | | | cells |
| | | A24 | 20 | IYMDGTADFSF | 680 | autologous |
| | | | | | | tumor |
| | | | | | | cells |
| | | A26 | 8 | QCSGNFMGF | 681 | autologous |
| | | | | | | tumor |
| | | | | | | cells |
| | | B35 | 20 | TPRLPSSADVEF | 682 | autologous |
| | | | | | | tumor |
| | | | | | | cells |
| | | B35 | 20 | LPSSADVEF | 683 | autologous |
| | | | | | | tumor |
| | | | | | | cells |
| | | B38 | 5 | LHHAFVDSIF | 684 | autologous |
| | | | | | | tumor |
| | | | | | | cells |
| | | B44 | 21 | SEIWRDIDF^{d} | 685 | autologous |
| | | | | | | tumor |
| | | | | | | cells |
| | | DR4 | 24 | QNILLSNAPLGPQFP | 686 | autologous |
| | | | | | | tumor |
| | | | | | | cells |
| | | DR4 | 24 | SYLQDSDPDSFQD | 687 | autologous |
| | | | | | | tumor |
| | | | | | | cells |
| | | DR15 | 20 | FLLHHAFVDSIFEQWLQR | 688 | autologous |
| | | | | HRP | | tumor |
| | | | | | | cells |

^{b}Frequency in Caucasians, based on (1) Marsh SGE, Parham P, Barber LD. The HLA Factsbook (Academic Press, 2000) for HLA-A, B, C, and DR, and (2) Colombani J. HLA, Fonctions immunitaires et applications médicales (John Libbey Eurotext, 1993) for HLA-DP and DR.
^{c}Not available.
^{d}Different alleles encoding tyrosinase have been described. In 50% of Caucasians, the serine residue of nonapeptide SEIWRDIDF is replaced by a tyrosine.
^{e}The peptide is composed of two non-contiguous fragments that are spliced by the proteasome.
^{f}Phosphopeptide.
^{g}Seems to be poorly processed by tumor cells (Fauquembergue, 2010).

TABLE 19
Antigens Overexpressed in Tumors

| | Normal | | HLA | | SEQ | Lymphocyte |
|---|---|---|---|---|---|---|
| | tissue | | Frequency^{b} | | ID | Stimulation |
| Gene | expression | HLA^{a} | (%) | Peptide | NO: | Method |
| adipophilin | adipocytes, | A2 | 44 | SVASTITGV | 689 | peptide |
| | macrophages | | | | | |
| AIM-2 | ubiquitous | A1 | 26 | RSDSGQQARY | 690 | autologous |
| | (low level) | | | | | tumor cells |
| ALDH1A1 | mucosa, | A2 | 44 | LLYKLADLI | 691 | peptide |
| | keratinocytes | | | | | |
| BCLX (L) | ubiquitous | A2 | 44 | YLNDHLEPWI | 692 | peptide |
| | (low level) | | | | | |
| BING-4 | ubiquitous | A2 | 44 | CQWGRLWQL | 693 | anti-CD3 |
| | (low level) | | | | | |
| CALCA | thyroid | A2 | 44 | VLLQAGSLHA | 694 | autologous |
| | | | | | | tumor cells |
| CD45 | proliferating | A24 | 20 | KFLDALISL | 695 | peptide |
| | cells, | | | | | |
| | testis, | | | | | |
| | multiple | | | | | |
| | tissues | | | | | |
| | (low level) | | | | | |
| CD274 | multiple | A2 | 44 | LLNAFTVTV | 696 | peptide |
| | tissues | | | | | |
| | (lung, | | | | | |
| | heart, | | | | | |
| | dendritic | | | | | |
| | cells, ...) | | | | | |
| | and | | | | | |
| | induced | | | | | |
| | by IFN-γ | | | | | |
| CPSF | ubiquitous | A2 | 44 | KVHPVIWSL | 697 | autologous |
| | (low level) | | | | | tumor cells |
| | | A2 | 44 | LMLQNALTTM | 698 | autologous |
| | | | | | | tumor cells |
| cyclin D1 | ubiquitous | A2 | 44 | LLGATCMFV | 699 | peptide |
| | (low level) | DR4 | 24 | NPPSMVAAGSVV | 700 | peptide |
| | | | | AAV | | |
| DKK1 | testis, | A2 | 44 | ALGGHPLLGV | 701 | peptide |
| | prostate, | | | | | |
| | mesenchymal | | | | | |
| | stem | | | | | |
| | cells | | | | | |
| ENAH (hMena) | breast, | A2 | 44 | TMNGSKSPV | 702 | peptide |
| | prostate | | | | | |
| | stroma | | | | | |
| | and | | | | | |
| | epithelium | | | | | |
| | of colon- | | | | | |
| | rectum, | | | | | |
| | pancreas, | | | | | |
| | endometrium | | | | | |
| EpCAM | epithelial | A24 | 20 | RYQLDPKFI | 703 | peptide |
| | cells | | | | | |
| EphA3 | many | DR11 | 25 | DVTFNIICKKCG | 704 | autologous |
| | | | | | | tumor cells |
| EZH2 | ubiquitous | A2 | 44 | FMVEDETVL | 705 | peptide |
| | (low level) | A2 | 44 | FINDEIFVEL | 706 | peptide |
| | | A24 | 20 | KYDCFLHPF | 707 | peptide |
| | | A24 | 20 | KYVGIEREM | 708 | peptide |
| FGF5 | brain, | A3 | 22 | NTYASPRFK^{f} | 709 | autologous |
| | kidney | | | | | tumor cells |
| glypican-3 | placental | A2 | 44 | FVGEFFTDV | 710 | peptide |
| | and | A24 | 20 | EYILSLEEL | 711 | peptide |
| | multiple | | | | | |
| | tissues | | | | | |
| G250/MN/ | stomach, | A2 | 44 | HLSTAFARV | 712 | peptide |
| CAIX | liver, | | | | | |
| | pancreas | | | | | |
| HER-2/ | ubiquitous | A2 | 44 | KIFGSLAFL | 713 | autologous |
| neu | (low level) | | | | | tumor cells |
| | | A2 | 44 | IISAVVGIL | 714 | peptide |
| | | A2 | 44 | ALCRWGLLL | 715 | peptide |
| | | A2 | 44 | ILHNGAYSL | 716 | peptide |
| | | A2 | 44 | RLLQETELV | 717 | peptide |
| | | A2 | 44 | VVLGVVFGI | 718 | peptide |
| | | A2 | 44 | YMIMVKCWMI | 719 | peptide |
| | | A2 | 44 | HLYQGCQVV | 720 | peptide |
| | | A2 | 44 | YLVPQQGFFC | 721 | peptide |
| | | A2 | 44 | PLQPEQLQV | 722 | peptide^{d} |
| | | A2 | 44 | TLEEITGYL | 723 | peptide^{d} |
| | | A2 | 44 | ALIHHNTHL | 724 | peptide^{d} |
| | | A2 | 44 | PLTSIISAV | 725 | peptide^{d} |
| | | A3 | 22 | VLRENTSPK | 726 | peptide |
| | | A24 | 20 | TYLPTNASL | 727 | peptide |
| HLA-DOB | B | A2 | 44 | FLLGLIFLL | 728 | peptide |
| | lymphocytes, | | | | | |
| | monocytes, | | | | | |
| | blood | | | | | |
| | cells, | | | | | |
| | adrenals, ... | | | | | |
| Hepsin | kidney, | A2 | 44 | SLLSGDWVL | 729 | peptide |
| | liver, skin, ... | A2 | 44 | GLQLGVQAV | 730 | peptide |
| | | A2 | 44 | PLTEYIQPV | 731 | peptide |
| IDO1 | lymph | A2 | 44 | ALLEIASCL | 732 | peptide |
| | nodes, | | | | | |
| | placenta, | | | | | |
| | and many | | | | | |
| | cell types | | | | | |
| | in the | | | | | |
| | course of | | | | | |
| | inflammatory | | | | | |
| | response | | | | | |
| IGF2B3 | ubiquitous | A2 | 44 | NLSSAEVVV | 733 | peptide |
| | (low level) | A3 | 44 | RLLVPTQFV | 734 | peptide |
| IL13Ralpha2 | | A2 | 44 | WLPFGFILI | 735 | peptide |
| Intestinal | liver, | B7 | 17 | SPRWWPTCL | 736 | autologous |
| carboxyl | intestine, | | | | | tumor cells |
| esterase | kidney | | | | | |
| alpha- | liver | A2 | 44 | GVALQTMKQ | 737 | adenovirus- |
| foetoprotein | | | | | | dendritic |
| | | | | | | cells |
| | | A2 | 44 | FMNKFIYEI | 738 | peptide |
| | | DR13 | 19 | QLAVSVILRV | 739 | peptide |
| Kallikrein 4 | prostate | A2 | 44 | FLGYLILGV | 740 | peptide |
| | and | DP4 | 75 | SVSESDTIRSISIAS | 741 | peptide |
| | ovarian | DR4 | 24 | LLANGRMPTVLQ | 742 | peptide |
| | cancer | | | CVN | | |
| | cancer | DR7 | 25 | RMPTVLQCVNVS | 743 | peptide |
| | | | | VVS | | |
| KIF20A | ubiquitous | A2 | 44 | LLSDDDVVV | 744 | peptide |
| | (low level) | A2 | 44 | AQPDTAPLPV | 745 | peptide |
| | | A2 | 44 | CIAEQYHTV | 746 | peptide |
| Lengsin | eye lens | A2 | 44 | FLPEFGISSA | 747 | peptide |
| | and low | | | | | |
| | level in | | | | | |
| | multiple | | | | | |
| | tissues | | | | | |
| M-CSF | liver, | B35 | 20 | LPAVVGLSPGEQEY | 748 | autologous |
| | kidney | | | | | tumor cells |
| MCSP | endothelial | DR11 | 25 | VGQDVSVLFRVT | 749 | peptide |
| | cells, | | | GALQ | | |
| | chondrocytes, | | | | | |
| | smooth | | | | | |
| | muscle | | | | | |
| | cells | | | | | |
| mdm-2 | ubiquitous | A2 | 44 | VLFYLGQY | 750 | tumor |
| | (brain, | | | | | lysate- |
| | muscle, | | | | | pulsed |
| | lung) | | | | | APCs |
| Meloe | ubiquitous | A2 | 44 | TLNDECWPA | 751 | tumor- |
| | (low level) | | | | | infiltrating |
| | | | | | | lymphocytes |
| | | DQ2 | 41 | ERISSTLNDECWPA | 752 | peptide/protein |
| | | DQ6 | 63 | FGRLQGISPKI | 753 | peptide |
| | | DR1 | 18 | TSREQFLPSEGAA | 754 | peptide/protein |
| | | DR11 | 25 | CPPWHPSERISSTL | 755 | peptide |
| Midkine | ubiquitous | A2 | 44 | ALLALTSAV | 756 | peptide |
| | (low level) | A2 | 44 | AQCQETIRV | 757 | peptide |
| | | DR4 | 24 | LTLLALLALTSAV | 758 | peptide |
| | | AK | | | | |
| MMP-2 | ubiquitous | A2 | 44 | GLPPDVQRV^{h} | 759 | autologous |
| | | | | | | tumor cells |
| MMP-7 | ubiquitous | A3 | 22 | SLFPNSPKWTSK | 760 | peptide |
| | (low level) | | | | | |
| MUC1 | glandular | A2 | 44 | STAPPVHNV | 761 | peptide |
| | epithelia | A2 | 44 | LLLLTVLTV | 762 | peptide |
| | | DR3 | 21 | PGSTAPPAHGVT | 763 | peptide |
| MUC5AC | surface | A24 | 20 | TCQPTCRSL | 764 | peptide |
| | mucosal | | | | | |
| | cells, | | | | | |
| | respiratory | | | | | |
| | tract, and | | | | | |
| | stomach | | | | | |
| | epithelia | | | | | |
| p53 | ubiquitous | A2 | 44 | LLGRNSFEV | 765 | peptide |
| | (low level) | A2 | 44 | RMPEAAPPV | 766 | peptide |
| | | B46 | 0.1 | SQKTYQGSY | 767 | autologous |
| | | | | | | tumor cells |
| | | DP5 | 3 | PGTRVRAMAIYKQ | 768 | peptide |
| | | DR14 | 6 | HLIRVEGNLRVE | 769 | peptide |
| PAX5 | hemopoietic | A2 | 44 | TLPGYPPHV | 770 | peptide |
| | system | | | | | |
| PBF | ovary, | B55 | 4 | CTACRWKKACQR | 771 | autologous |
| | pancreas, | | | | | tumor cells |
| | spleen, | | | | | |
| | liver | | | | | |
| PRAME | testis, | A2 | 44 | VLDGLDVLL | 772 | peptide |
| | ovary, | A2 | 44 | SLYSFPEPEA | 773 | peptide |
| | endometrium, | A2 | 44 | ALYVDSLFFL | 774 | peptide |
| | adrenals | A2 | 44 | SLLQHLIGL | 775 | peptide |
| | | A24 | 20 | LYVDSLFFL^{c} | 776 | autologous |
| | | | | | | tumor cells |
| PSMA | prostate, | A24 | 20 | NYARTEDFF | 777 | peptide |
| | CNS, liver | | | | | |
| RAGE-1 | retina | A2 | 44 | LKLSGVVRL | 778 | peptide |
| | | A2 | 44 | PLPPARNGGL^{g} | 779 | peptide |
| | | B7 | 17 | SPSSNRIRNT | 780 | autologous |
| | | | | | | tumor cells |
| RGS5 | heart, | A2 | 44 | LAALPHSCL | 781 | peptide |
| | skeletal | A3 | 22 | GLASFKSFLK | 782 | peptide |
| | muscle, | | | | | |
| | pericytes | | | | | |
| RhoC | ubiquitous | A3 | 22 | RAGLQVRKNK | 783 | peptide |
| | (low level) | | | | | |
| RNF43 | | A2 | 44 | ALWPWLLMA(T) | 784 | peptide |
| | | A24 | 20 | NSQPVWLCL | 785 | peptide |
| RU2AS | testis, | B7 | 17 | LPRWPPPQL | 786 | autologous |
| | kidney, | | | | | tumor cells |
| | bladder | | | | | |
| secernin 1 | ubiquitous | A2 | 44 | KMDAEHPEL | 787 | peptide |
| SOX10 | ubiquitous | A2 | 44 | AWISKPPGV | 788 | tumor- |
| | (low level) | | | | | infiltrating |
| | | | | | | lymphocytes |
| | | A2 | 44 | SAWISKPPGV | 789 | tumor- |
| | | | | | | infiltrating |
| | | | | | | lymphocytes |
| STEAP1 | prostate | A2 | 44 | MIAVFLPIV | 790 | peptide |
| | | A2 | 44 | HQQYFYKIPILVINK | 791 | peptide |
| survivin | ubiquitous | A2 | 44 | ELTLGEFLKL | 792 | peptide/ |
| | | | | | | protein |
| | ubiquitous | DR1 | 18 | TLGEFLKLDRERA | 793 | peptide/ |
| | | | | KN | | protein |
| Telomerase | testis, | A2 | 44 | ILAKFLHWL^{e} | 794 | peptide |
| | thymus, | A2 | 44 | RLVDDFLLV | 795 | peptide |
| | bone | DR7 | 25 | RPGLLGASVLGL | 796 | peptide |
| | marrow, | | | DDI | | |
| | lymph | DR11 | 25 | LTDLQPYMRQFV | 797 | peptide |
| | nodes | | | AHL | | |
| TPBG | multiple | A2 | 44 | RLARLALVL | 798 | peptide |
| | tissues | | | | | |
| | (esophagus, | | | | | |
| | bladder, ...) | | | | | |
| VEGF | ubiquitous | B27 | 7 | SRFGGAVVR | 799 | peptide |
| | (low level) | | | | | |
| WT1 | testis, | A1 | 26 | TSEKRPFMCAY | 800 | peptide |
| | ovary, | A24 | 20 | CMTWNQMNL | 801 | peptide |
| | bone | DP5 | 3 | LSHLQMHSRKH | 802 | peptide |
| | marrow, | DP5 | 3 | KRYFKLSHLQMH | 803 | peptide |
| | spleen | | | SRKH | | |
| | | DR4 | 24 | KRYFKLSHLQMH | 804 | peptide |
| | | | | SRKH | | |

^{b}Frequency in Caucasians, based on (1) Marsh SGE, Parham P, Barber LD. The HLA Factsbook (Academic Press, 2000) for HLA-A, B, C, and DR, and (2) Colombani J. HLA, Fonctions immunitaires et applications médicales (John Libbey Eurotext, 1993) for HLA-DP and DR.
^{c}The antigen is recognized by CTLs bearing an NK inhibitory receptor that prevents lysis of cells expressing certain HLA-C molecules.
^{d}A variant peptide with a Y in position 1 was used for T cell stimulation.
^{e}Poorly or not processed (Parkhurst, 2004; Ayyoub, 2001).
^{f}The peptide is composed of two non-contiguous fragments that are spliced.
^{g}Alternative transcript.
^{h}MMP-2 is expressed ubiquitously but melanoma cells cross-present, in an αvβ3-dependent manner, an antigen derived from secreted MMP-2.
ⁱThe epitope is located in the untranslated region.

[0219] The cytoplasmic domain (also referred to as “intracellular signaling domain”) of the CAR molecule of the invention is responsible for activation of at least one of the normal effector functions of the immune cell in which the CAR has been placed in.

[0220] The term “effector function” refers to a specialized function of a cell. Effector function of a T cell, for example, may be cytolytic activity or helper activity including the secretion of cytokines. Thus the term “intracellular signaling domain” refers to the portion of a protein which transduces the effector function signal and directs the cell to perform a specialized function. While usually the entire intracellular signaling domain can be employed, in many cases it is not necessary to use the entire chain. To the extent that a truncated portion of the intracellular signaling domain is used, such truncated portion may be used in place of the intact chain as long as it transduces the effector function signal. The term intracellular signaling domain is thus meant to include any truncated portion of the intracellular signaling domain sufficient to transduce the effector function signal.

[0221] Preferred examples of intracellular signaling domains for use in the CAR molecule of the invention include the cytoplasmic sequences of the T cell receptor (TCR) and co-receptors that act in concert to initiate signal transduction following antigen receptor engagement, as well as any derivative or variant of these sequences and any synthetic sequence that has the same functional capability.

[0222] It is known that signals generated through the TCR alone are insufficient for full activation of the T cell and that a secondary or co-stimulatory signal is also required. Thus, T cell activation can be mediated by two distinct classes of cytoplasmic signaling sequence: those that initiate antigen-dependent primary activation through the TCR (primary cytoplasmic signaling sequences) and those that act in an antigen-independent manner to provide a secondary or co-stimulatory signal (secondary cytoplasmic signaling sequences).

[0223] Primary cytoplasmic signaling sequences regulate primary activation of the TCR complex either in a stimulatory way, or in an inhibitory way. Primary cytoplasmic signaling sequences that act in a stimulatory manner may contain signaling motifs which are known as immunoreceptor tyrosine-based activation motifs (ITAMs).

[0224] Examples of ITAM containing primary cytoplasmic signaling sequences that are of particular use in the invention include those derived from TCR zeta, FcR gamma, FcR beta, CD3 gamma, CD3 delta, CD3 epsilon, CD5, CD22, CD79a, CD79b, and CD66d. It is particularly preferred that cytoplasmic signaling molecule in the CAR of the invention comprises a cytoplasmic signaling sequence derived from CD3 zeta.

[0225] In a preferred embodiment, the cytoplasmic domain of the CAR can be designed to comprise the CD3-zeta signaling domain by itself or combined with any other desired cytoplasmic domain(s) useful in the context of the CAR of the invention. For example, the cytoplasmic domain of the CAR can comprise a CD3 zeta chain portion and a costimulatory signaling region. The costimulatory signaling region refers to a portion of the CAR comprising the intracellular domain of a costimulatory molecule. A co-stimulatory molecule is a cell surface molecule other than an antigen receptor or their ligands that is required for an efficient response of lymphocytes to an antigen. Examples of such molecules include CD27, CD28, 4-1BB (CD137), OX40, CD30, CD40, PD-1, ICOS, lymphocyte function-associated antigen-1 (LFA-1), CD2, CD7, LIGHT, NKG2C, B7-H3, and a ligand that specifically binds with CD83, and the like. Thus, while the invention in exemplified primarily with 4-1BB as the co-stimulatory signaling element, other costimulatory elements are within the scope of the invention.

[0226] According to some embodiments of the invention, the intracellular domain comprises, a co-stimulatory signaling region and a zeta chain portion. The co-stimulatory signaling region refers to a portion of the CAR molecule comprising the intracellular domain of a co-stimulatory molecule. Co-stimulatory molecules are cell surface molecules other than antigen receptors or their ligands that are required for an efficient response of lymphocytes to antigen.

[0227] “Co-stimulatory ligand,” as the term is used herein, includes a molecule on an antigen presenting cell [e.g., an aAPC (artificial antigen presenting cell), dendritic cell, B cell, and the like] that specifically binds a cognate co-stimulatory molecule on a T cell, thereby providing a signal which, in addition to the primary signal provided by, for instance, binding of a TCR/CD3 complex with an MHC molecule loaded with peptide, mediates a T cell response, including, but not limited to, proliferation, activation, differentiation, and the like. A co-stimulatory ligand can include, but is not limited to, CD7, B7-1 (CD80), B7-2 (CD86), PD-L1, PD-L2, 4-1BBL, OX40L, inducible costimulatory ligand (ICOS-L), intercellular adhesion molecule (ICAM), CD30L, CD40, CD70, CD83, HLA-G, MICA, MICB, HVEM, lymphotoxin beta receptor, 3/TR6, ILT3, ILT4, HVEM, an agonist or antibody that binds Toll ligand receptor and a ligand that specifically binds with B7-H3. A co-stimulatory ligand also encompasses, inter alia, an antibody that specifically binds with a co-stimulatory molecule present on a T cell, such as, but not limited to, CD27, CD28, 4-1BB, OX40, CD30, CD40, PD-1, ICOS, lymphocyte function-associated antigen-1 (LFA-1), CD2, CD7, LIGHT, NKG2C, B7-H3, and a ligand that specifically binds with CD83.

[0228] A “co-stimulatory molecule” refers to the cognate binding partner on a T cell that specifically binds with a co-stimulatory ligand, thereby mediating a co-stimulatory response by the T cell, such as, but not limited to, proliferation. Co-stimulatory molecules include, but are not limited to an MHC class 1 molecule, BTLA and a Toll ligand receptor.

[0229] A “co-stimulatory signal”, as used herein, refers to a signal, which in combination with a primary signal, such as TCR/CD3 ligation, leads to T cell proliferation and/or upregulation or down regulation of key molecules.

By the term “stimulation,” is meant a primary response induced by binding of a stimulatory molecule (e.g., a TCR/CD3 complex) with its cognate ligand thereby mediating a signal transduction event, such as, but not limited to, signal transduction via the TCR/CD3 complex. Stimulation can mediate altered expression of certain molecules, such as downregulation of TGF-β, and/or reorganization of cytoskeletal structures, and the like.

[0230] A “stimulatory molecule,” as the term is used herein, means a molecule on a T cell that specifically binds with a cognate stimulatory ligand present on an antigen presenting cell.

[0231] A “stimulatory ligand,” as used herein, means a ligand that when present on an antigen presenting cell (e.g., an aAPC, a dendritic cell, a B-cell, and the like) can specifically bind with a cognate binding partner (referred to herein as a “stimulatory molecule”) on a T cell, thereby mediating a primary response by the T cell, including, but not limited to, activation, initiation of an immune response, proliferation, and the like. Stimulatory ligands are well-known in the art and encompass, inter cilia, an MHC Class I molecule loaded with a peptide, an anti-CD3 antibody, a superagonist anti-CD28 antibody, and a superagonist anti-CD2 antibody.

[0232] With respect to the cytoplasmic domain, the CAR molecule of some embodiments of the invention can be designed to comprise the CD28 and/or 4-1BB signaling domain by itself or be combined with any other desired cytoplasmic domain(s) useful in the context of the CAR molecule of some embodiments of the invention. In one embodiment, the cytoplasmic domain of the CAR can be designed to further comprise the signaling domain of CD3-zeta. For example, the cytoplasmic domain of the CAR can include but is not limited to CD3-zeta, 4-1BB and CD28 signaling modules and combinations thereof.

[0233] According to some embodiments of the invention, the intracellular domain comprises at least one, e.g., at least two, at least three, at least four, at least five, e.g., at least six of the polypeptides selected from the group consisting of: CD3 (CD247, CD3z), CD28, 41BB, ICOS, OX40, and CD137.

[0234] According to some embodiments of the invention, the intracellular domain comprises the CD3ζ-chain [CD247 molecule, also known as “CD3-ZETA” and “CD3z”; GenBank Accession NOs. NP_000725.1 (SEQ ID NO:86) and NP_932170.1 (SEQ ID NO:87)], which is the primary transmitter of signals from endogenous TCRs.

[0235] According to some embodiments of the invention, the intracellular domain comprises various co-stimulatory protein receptors to the cytoplasmic tail of the CAR to provide additional signals to the T cell (second generation CAR). Examples include, but are not limited to, CD28 [e.g., GenBank Accession Nos. NP_001230006.1 (SEQ ID NO:88), NP_001230007.1 (SEQ ID NO:89), NP_006130.1 (SEQ ID NO:90)], 4-1BB [tumor necrosis factor receptor superfamily, member 9 (TNFRSF9), also known as “CD137”, e.g., GenBank Accession No. NP_001552.2 (SEQ ID NO:91)], and ICOS [inducible T-cell co-stimulator, e.g., GenBank Accession No. NP_036224.1 (SEQ ID NO:92)]. Preclinical studies have indicated that the second generation of CAR designs improves the antitumor activity of T cells.

[0236] According to some embodiments of the invention, the intracellular domain comprises multiple signaling domains, such as CD3z-CD28-41BB or CD3z-CD28-OX40, to further augment potency. The term “OX40” refers to the tumor necrosis factor receptor superfamily, member 4 (TNFRSF4), e.g., GenBank Accession No. NP_003318.1 (SEQ ID NO:93) (“third-generation” CARs).

[0237] According to some embodiments of the invention, the intracellular domain comprises CD28-CD3z, CD3z, CD28-CD137-CD3z. The term “CD137” refers to tumor necrosis factor receptor superfamily, member 9 (TNFRSF9), e.g., GenBank Accession No. NP_001552.2 (SEQ ID NO:91).

[0238] According to some embodiments of the invention, when the CAR molecule is designed for a natural killer cell, then the signaling domain can be CD28 and/or CD3. The transmembrane domain may be derived either from a natural or from a synthetic source. Where the source is natural, the domain may be derived from any membrane-bound or transmembrane protein. Transmembrane regions of particular use in this invention may be derived from (i.e. comprise at least the transmembrane region(s) of) the alpha, beta or zeta chain of the T-cell receptor, CD28, CD3 epsilon, CD45, CD4, CD5, CD8, CD9, CD16, CD22, CD33, CD37, CD64, CD80, CD86, CD134, CD137, CD154. Alternatively the transmembrane domain may be synthetic, in which case it will comprise predominantly hydrophobic residues such as leucine and valine. Preferably a triplet of phenylalanine, tryptophan and valine will be found at each end of a synthetic transmembrane domain. Optionally, a short oligo- or polypeptide linker, preferably between 2 and 10 amino acids in length may form the linkage between the transmembrane domain and the cytoplasmic signaling domain of the CAR. A glycine-serine doublet provides a particularly suitable linker.

[0239] According to some embodiments of the invention, the transmembrane domain comprised in the CAR molecule of some embodiments of the invention is a transmembrane domain that is naturally associated with one of the domains in the CAR. According to some embodiments of the invention, the transmembrane domain can be selected or modified by amino acid substitution to avoid binding of such domains to the transmembrane domains of the same or different surface membrane proteins to minimize interactions with other members of the receptor complex.

[0240] According to some embodiments of the invention, the transmembrane domain is the CD8a hinge domain. In one embodiment, the CD8 hinge domain comprises the nucleic acid sequence of SEQ ID NO:34. In one embodiment, the CD8 hinge domain comprises the nucleic acid sequence that encodes the amino acid sequence of SEQ ID NO: 35).

[0241] According to some embodiments, between the extracellular domain and the transmembrane domain of the CAR molecule, or between the cytoplasmic domain and the transmembrane domain of the CAR molecule, there may be incorporated a spacer domain. As used herein, the term “spacer domain” generally means any oligo- or polypeptide that functions to link the transmembrane domain to, either the extracellular domain or, the cytoplasmic domain in the polypeptide chain. A spacer domain may comprise up to 300 amino acids, preferably 10 to 100 amino acids and most preferably 25 to 50 amino acids.

[0242] According to an aspect of some embodiments of the invention there is provided an isolated polynucleotide comprising a nucleic acid sequence encoding the molecule of some embodiments of the invention.

[0243] As used herein the term “polynucleotide” refers to a single or double stranded nucleic acid sequence which is isolated and provided in the form of an RNA sequence, a complementary polynucleotide sequence (cDNA), a genomic polynucleotide sequence and/or a composite polynucleotide sequences (e.g., a combination of the above).

[0244] The term “isolated” refers to at least partially separated from the natural environment e.g., from a cell, or from a tissue, e.g., from a human body.

[0245] The isolated polynucleotide can be obtained using recombinant methods known in the art, such as, for example by screening libraries from cells expressing the gene, by deriving the gene from a vector known to include the same, or by isolating directly from cells and tissues containing the same, using standard techniques.

[0246] Alternatively, the gene of interest can be produced synthetically, rather than cloned.

[0247] According to an aspect of some embodiments of the invention there is provided a nucleic acid construct comprising an isolated polynucleotide comprising a nucleic acid sequence encoding the molecule of some embodiments of the invention and a cis-acting regulatory element for directing transcription of the isolated polynucleotide in a host cell.

[0248] Thus, the expression of natural or synthetic nucleic acids encoding the CAR molecule of the invention is typically achieved by operably linking a nucleic acid encoding the CAR polypeptide or portions thereof to a cis-acting regulatory element (e.g., a promoter sequence), and incorporating the construct into an expression vector. The nucleic acid construct of the invention may also include an enhancer, a transcription and translation initiation sequence, transcription and translation terminator and a polyadenylation signal, a 5′ LTR, a tRNA binding site, a packaging signal, an origin of second-strand DNA synthesis, and a 3′ LTR or a portion thereof; additional polynucleotide sequences that allow, for example, the translation of several proteins from a single mRNA such as an internal ribosome entry site (IRES) and sequences for genomic integration of the promoter-chimeric polypeptide; sequences engineered to enhance stability, production, purification, yield or toxicity of the expressed peptide.

[0249] Enhancers regulate the frequency of transcriptional initiation. Typically, promoter elements are located in the region 30-110 bp upstream of the start site, although a number of promoters have recently been shown to contain functional elements downstream of the start site as well. The spacing between promoter elements frequently is flexible, so that promoter function is preserved when elements are inverted or moved relative to one another. In the thymidine kinase (tk) promoter, the spacing between promoter elements can be increased to 50 bp apart before activity begins to decline. Depending on the promoter, it appears that individual elements can function either cooperatively or independently to activate transcription.

[0250] One example of a suitable promoter is the immediate early cytomegalovirus (CMV) promoter sequence. This promoter sequence is a strong constitutive promoter sequence capable of driving high levels of expression of any polynucleotide sequence operatively linked thereto. Another example of a suitable promoter is Elongation Growth Factor-1.alpha. (EF-1.alpha.). However, other constitutive promoter sequences may also be used, including, but not limited to the simian virus 40 (SV40) early promoter, mouse mammary tumor virus (MMTV), human immunodeficiency virus (HIV) long terminal repeat (LTR) promoter, MoMuLV promoter, an avian leukemia virus promoter, an Epstein-Barr virus immediate early promoter, a Rous sarcoma virus promoter, as well as human gene promoters such as, but not limited to, the actin promoter, the myosin promoter, the hemoglobin promoter, and the creatine kinase promoter. Further, the invention should not be limited to the use of constitutive promoters. Inducible promoters are also contemplated as part of the invention. The use of an inducible promoter provides a molecular switch capable of turning on expression of the polynucleotide sequence which it is operatively linked when such expression is desired, or turning off the expression when expression is not desired. Examples of inducible promoters include, but are not limited to a metallothionine promoter, a glucocorticoid promoter, a progesterone promoter, and a tetracycline promoter.

[0251] The isolated polynucleotide of the invention can be cloned into a number of types of vectors. For example, the isolated polynucleotide can be cloned into a vector including, but not limited to a plasmid, a phagemid, a phage derivative, an animal virus, and a cosmid. Vectors of particular interest include expression vectors, replication vectors, probe generation vectors, and sequencing vectors.

[0252] Examples for mammalian expression vectors include, but are not limited to, pcDNA3, pcDNA3.1(+/−), pGL3, pZeoSV2(+/−), pSecTag2, pDisplay, pEF/myc/cyto, pCMV/myc/cyto, pCR3.1, pSinRep5, DH26S, DHBB, pNMT1, pNMT41, pNMT81, which are available from Invitrogen, pCI which is available from Promega, pMbac, pPbac, pBK-RSV and pBK-CMV which are available from Strategene, pTRES which is available from Clontech, and their derivatives.

[0253] Expression vectors containing regulatory elements from eukaryotic viruses such as retroviruses can be also used. SV40 vectors include pSVT7 and pMT2. Vectors derived from bovine papilloma virus include pBV-1MTHA, and vectors derived from Epstein Bar virus include pHEBO, and p205. Other exemplary vectors include pMSG, pAV009/A⁺, pMT010/A⁺, pMAMneo-5, baculovirus pDSVE, and any other vector allowing expression of proteins under the direction of the SV-40 early promoter, SV-40 later promoter, metallothionein promoter, murine mammary tumor virus promoter, Rous sarcoma virus promoter, polyhedrin promoter, or other promoters shown effective for expression in eukaryotic cells.

[0254] Currently preferred in vivo or in vitro nucleic acid transfer techniques include transfection with viral or non-viral constructs, such as adenovirus, lentivirus, Herpes simplex I virus, or adeno-associated virus (AAV). Recombinant viral vectors offer advantages such as lateral infection and targeting specificity. Introduction of nucleic acids by viral infection offers several advantages over other methods such as lipofection and electroporation, since higher transfection efficiency can be obtained due to the infectious nature of viruses.

[0255] Viral vector technology is well known in the art and is described, for example, in Sambrook et al. (2001, Molecular Cloning: A Laboratory Manual, Cold Spring Harbor Laboratory, New York), and in other virology and molecular biology manuals. Viruses, which are useful as vectors include, but are not limited to, retroviruses, adenoviruses, adeno-associated viruses, herpes viruses, and lentiviruses. In general, a suitable vector contains an origin of replication functional in at least one organism, a promoter sequence, convenient restriction endonuclease sites, and one or more selectable markers, (e.g., WO 01/96584; WO 01/29058; and U.S. Pat. No. 6,326,193).

[0256] According to some embodiments of the invention, the nucleic acid construct of the invention is a viral vector.

[0257] Vectors derived from retroviruses such as the lentivirus are suitable tools to achieve long-term gene transfer since they allow long-term, stable integration of a transgene and its propagation in daughter cells. Lentiviral vectors have the added advantage over vectors derived from onco-retroviruses such as murine leukemia viruses in that they can transduce non-proliferating cells, such as hepatocytes. They also have the added advantage of low immunogenicity.

[0258] For example, retroviruses provide a convenient platform for gene delivery systems. A selected gene can be inserted into a vector and packaged in retroviral particles using techniques known in the art. The recombinant virus can then be isolated and delivered to cells of the subject either in vivo or ex vivo.

[0259] The nucleic acid construct of some embodiments of the invention may also be used for nucleic acid immunization and gene therapy, using standard gene delivery protocols. Methods for gene delivery are known in the art. See, e.g., U.S. Pat. Nos. 5,399,346, 5,580,859, 5,589,466, incorporated by reference herein in their entireties. In another embodiment, the invention provides a gene therapy vector.

[0260] In order to assess the expression of a CAR polypeptide or portions thereof, the nucleic acid construct to be introduced into a cell can also contain either a selectable marker gene or a reporter gene or both to facilitate identification and selection of expressing cells from the population of cells sought to be transfected or infected through viral vectors. In other aspects, the selectable marker may be carried on a separate piece of DNA and used in a co-transfection procedure. Both selectable markers and reporter genes may be flanked with appropriate regulatory sequences to enable expression in the host cells. Useful selectable markers include, for example, antibiotic-resistance genes, such as neo and the like.

[0261] Reporter genes are used for identifying potentially transfected cells and for evaluating the functionality of regulatory sequences. In general, a reporter gene is a gene that is not present in or expressed by the recipient organism or tissue and that encodes a polypeptide whose expression is manifested by some easily detectable property, e.g., enzymatic activity. Expression of the reporter gene is assayed at a suitable time after the DNA has been introduced into the recipient cells. Suitable reporter genes may include genes encoding luciferase, beta-galactosidase, chloramphenicol acetyl transferase, secreted alkaline phosphatase, or the green fluorescent protein gene (e.g., Ui-Tel et al., 2000 FEBS Letters 479: 79-82). Suitable expression systems are well known and may be prepared using known techniques or obtained commercially. In general, the construct with the minimal 5′ flanking region showing the highest level of expression of reporter gene is identified as the promoter. Such promoter regions may be linked to a reporter gene and used to evaluate agents for the ability to modulate promoter-driven transcription.

[0262] Various methods can be used to introduce the nucleic acid construct of the invention into a host cell, e.g., mammalian, bacterial, yeast, or insect cell. Such methods are generally described in Sambrook et al., Molecular Cloning: A Laboratory Manual, Cold Springs Harbor Laboratory, New York (1989, 1992), in Ausubel et al., Current Protocols in Molecular Biology, John Wiley and Sons, Baltimore, Md. (1989), Chang et al., Somatic Gene Therapy, CRC Press, Ann Arbor, Mich. (1995), Vega et al., Gene Targeting, CRC Press, Ann Arbor Mich. (1995), Vectors: A Survey of Molecular Cloning Vectors and Their Uses, Butterworths, Boston Mass. (1988) and Gilboa et at. [Biotechniques 4 (6): 504-512, 1986] and include, physical, chemical, or biological means (e.g., stable or transient transfection, lipofection, electroporation and infection with recombinant viral vectors). In addition, see U.S. Pat. Nos. 5,464,764 and 5,487,992 for positive-negative selection methods.

[0263] Physical methods for introducing a polynucleotide into a host cell include calcium phosphate precipitation, lipofection, particle bombardment, microinjection, electroporation, and the like. Methods for producing cells comprising vectors and/or exogenous nucleic acids are well-known in the art. See, for example, Sambrook et al. (2001, Molecular Cloning: A Laboratory Manual, Cold Spring Harbor Laboratory, New York). A preferred method for the introduction of a polynucleotide into a host cell is calcium phosphate transfection.

[0264] Chemical means for introducing a polynucleotide into a host cell include colloidal dispersion systems, such as macromolecule complexes, nanocapsules, microspheres, beads, and lipid-based systems including oil-in-water emulsions, micelles, mixed micelles, and liposomes. An exemplary colloidal system for use as a delivery vehicle in vitro and in vivo is a liposome (e.g., an artificial membrane vesicle).

[0265] Biological methods for introducing a polynucleotide of interest into a host cell include the use of DNA and RNA vectors. Viral vectors, and especially retroviral vectors, have become the most widely used method for inserting genes into mammalian, e.g., human cells. Other viral vectors can be derived from lentivirus, poxviruses, herpes simplex virus 1, adenoviruses and adeno-associated viruses, and the like. See, for example, U.S. Pat. Nos. 5,350,674 and 5,585,362.

[0266] In the case where a non-viral delivery system is utilized, an exemplary delivery vehicle is a liposome.

[0267] “Liposome” is a generic term encompassing a variety of single and multilamellar lipid vehicles formed by the generation of enclosed lipid bilayers or aggregates. Liposomes can be characterized as having vesicular structures with a phospholipid bilayer membrane and an inner aqueous medium. Multilamellar liposomes have multiple lipid layers separated by aqueous medium. They form spontaneously when phospholipids are suspended in an excess of aqueous solution. The lipid components undergo self-rearrangement before the formation of closed structures and entrap water and dissolved solutes between the lipid bilayers (Ghosh et al., 1991 Glycobiology 5: 505-10). However, compositions that have different structures in solution than the normal vesicular structure are also encompassed. For example, the lipids may assume a micellar structure or merely exist as nonuniform aggregates of lipid molecules. Also contemplated are lipofectamine-nucleic acid complexes.

[0268] The use of lipid formulations is contemplated for the introduction of the nucleic acids into a host cell (in vitro, ex vivo or in vivo). In another aspect, the nucleic acid may be associated with a lipid. The nucleic acid associated with a lipid may be encapsulated in the aqueous interior of a liposome, interspersed within the lipid bilayer of a liposome, attached to a liposome via a linking molecule that is associated with both the liposome and the oligonucleotide, entrapped in a liposome, complexed with a liposome, dispersed in a solution containing a lipid, mixed with a lipid, combined with a lipid, contained as a suspension in a lipid, contained or complexed with a micelle, or otherwise associated with a lipid. Lipid, lipid/DNA or lipid/expression vector associated compositions are not limited to any particular structure in solution. For example, they may be present in a bilayer structure, as micelles, or with a “collapsed” structure. They may also simply be interspersed in a solution, possibly forming aggregates that are not uniform in size or shape. Lipids are fatty substances which may be naturally occurring or synthetic lipids. For example, lipids include the fatty droplets that naturally occur in the cytoplasm as well as the class of compounds which contain long-chain aliphatic hydrocarbons and their derivatives, such as fatty acids, alcohols, amines, amino alcohols, and aldehydes.

[0269] Lipids suitable for use can be obtained from commercial sources. For example, dimyristyl phosphatidylcholine (“DMPC”) can be obtained from Sigma, St. Louis, Mo.; dicetyl phosphate (“DCP”) can be obtained from K & K Laboratories (Plainview, N.Y.); cholesterol (“Choi”) can be obtained from Calbiochem-Behring; dimyristyl phosphatidylglycerol (“DMPG”); and other lipids may be obtained from Avanti Polar Lipids, Inc, (Birmingham, Ala.). Additionally or alternatively, the DOTMA, DOPE, and DC-Chol [Tonkinson et al., Cancer Investigation, 14(1): 54-65 (1996)] lipids can be used. Stock solutions of lipids in chloroform or chloroform/methanol can be stored at about −20.degree. C. Chloroform is used as the only solvent since it is more readily evaporated than methanol.

[0270] Regardless of the method used to introduce exogenous nucleic acids into a host cell, in order to confirm the presence of the recombinant DNA sequence in the host cell, a variety of assays may be performed. Such assays include, for example, “molecular biological” assays well known to those of skill in the art, such as Southern and Northern blotting, RT-PCR and PCR; “biochemical” assays, such as detecting the presence or absence of a particular peptide, e.g., by immunological means (ELISAs and Western blots) or by assays described herein to identify agents falling within the scope of the invention.

[0271] Thus, according to an aspect of some embodiments of the invention there is provided an isolated cell comprising the polynucleotide of some embodiments of the invention or the nucleic acid construct of some embodiments of the invention.

[0272] According to some embodiments of the invention, the cell is a T cell, a natural killer cell, a cell that exerts effector killing function on a target cell, a cell that exerts a suppressive effect on effector T cells, an engineered cell with an effector killing function or an engineered cell with a suppressive function.

[0273] According to some embodiments of the invention, the cell is a T cell.

[0274] According to some embodiments of the invention, the cell is a natural killer (NK) cell.

[0275] According to some embodiments of the invention, the natural killer cell is used to target cancer, viral and/or bacterial antigen(s).

[0276] According to some embodiments of the invention, the natural killer cell is used to treat a pathology caused by or associated with a viral infection, bacterial infection or cancer.

[0277] According to some embodiments of the invention, the T cell is a cytotoxic T cell (effector T cell).

[0278] According to some embodiments of the invention, the cytotoxic T cell (effector T cell) is used to target cancer, viral and/or bacterial antigen(s). According to some embodiments of the invention, the cytotoxic T cell is used to treat a pathology caused by or associated with a viral infection, bacterial infection or cancer.

[0279] According to some embodiments of the invention, the T cell comprises a Treg (T regulatory cell).

[0280] According to some embodiments of the invention, the Treg is used to target auto-immune antigen(s).

[0281] According to some embodiments of the invention, the Treg is used to treat an autoimmune disease.

[0282] According to some embodiments of the invention, the T cell comprises a CD4 T cell.

[0283] According to some embodiments of the invention, the T cell comprises a CD8 T cell.

[0284] Sources of T Cells

[0285] Prior to expansion and genetic modification of the T cells of the invention, a source of T cells is obtained from a subject. T cells can be obtained from a number of sources, including peripheral blood mononuclear cells (PBMCs), bone marrow, lymph node tissue, cord blood, thymus tissue, tissue from a site of infection, ascites, pleural effusion, spleen tissue, and tumors.

[0286] According to some embodiments of the invention, the T cell is obtained from peripheral blood mononuclear cells (PBMCs).

In certain embodiments of the present invention, any number of T cell lines available in the art, may be used. In certain embodiments of the present invention, T cells can be obtained from a unit of blood collected from a subject using any number of techniques known to the skilled artisan, such as Ficoll™ separation. In one preferred embodiment, cells from the circulating blood of an individual are obtained by apheresis. The apheresis product typically contains lymphocytes, including T cells, monocytes, granulocytes, B cells, other nucleated white blood cells, red blood cells, and platelets. In one embodiment, the cells collected by apheresis may be washed to remove the plasma fraction and to place the cells in an appropriate buffer or media for subsequent processing steps. In one embodiment of the invention, the cells are washed with phosphate buffered saline (PBS). In an alternative embodiment, the wash solution lacks calcium and may lack magnesium or may lack many if not all divalent cations. Again, surprisingly, initial activation steps in the absence of calcium lead to magnified activation. As those of ordinary skill in the art would readily appreciate a washing step may be accomplished by methods known to those in the art, such as by using a semi-automated “flow-through” centrifuge (for example, the Cobe 2991 cell processor, the Baxter CytoMate, or the Haemonetics Cell Saver 5) according to the manufacturer's instructions. After washing, the cells may be resuspended in a variety of biocompatible buffers, such as, for example, Ca.sup.2+-free, Mg.sup.2+-free PBS, PlasmaLyte A, or other saline solution with or without buffer. Alternatively, the undesirable components of the apheresis sample may be removed and the cells directly resuspended in culture media.

[0287] In another embodiment, T cells are isolated from peripheral blood lymphocytes by lysing the red blood cells and depleting the monocytes, for example, by centrifugation through a PERCOLL™ gradient or by counterflow centrifugal elutriation. A specific subpopulation of T cells, such as CD3.sup.+, CD28.sup.+, CD4.sup.+, CD8.sup.+, CD45RA.sup.+, and CD45RO.sup.+ T cells, can be further isolated by positive or negative selection techniques. For example, in one embodiment, T cells are isolated by incubation with anti-CD3/anti-CD28 (i.e., 3.times.28)-conjugated beads, such as DYNABEADS® M-450 CD3/CD28 T, for a time period sufficient for positive selection of the desired T cells. In one embodiment, the time period is about 30 minutes. In a further embodiment, the time period ranges from 30 minutes to 36 hours or longer and all integer values there between. In a further embodiment, the time period is at least 1, 2, 3, 4, 5, or 6 hours. In yet another preferred embodiment, the time period is 10 to 24 hours. In one preferred embodiment, the incubation time period is 24 hours. For isolation of T cells from patients with leukemia, use of longer incubation times, such as 24 hours, can increase cell yield. Longer incubation times may be used to isolate T cells in any situation where there are few T cells as compared to other cell types, such in isolating tumor infiltrating lymphocytes (TIL) from tumor tissue or from immune-compromised individuals. Further, use of longer incubation times can increase the efficiency of capture of CD8+ T cells. Thus, by simply shortening or lengthening the time T cells are allowed to bind to the CD3/CD28 beads and/or by increasing or decreasing the ratio of beads to T cells (as described further herein), subpopulations of T cells can be preferentially selected for or against at culture initiation or at other time points during the process.

[0288] Additionally, by increasing or decreasing the ratio of anti-CD3 and/or anti-CD28 antibodies on the beads or other surface, subpopulations of T cells can be preferentially selected for or against at culture initiation or at other desired time points. The skilled artisan would recognize that multiple rounds of selection can also be used in the context of this invention. In certain embodiments, it may be desirable to perform the selection procedure and use the “unselected” cells in the activation and expansion process. “Unselected” cells can also be subjected to further rounds of selection.

[0289] Enrichment of a T cell population by negative selection can be accomplished with a combination of antibodies directed to surface markers unique to the negatively selected cells. One method is cell sorting and/or selection via negative magnetic immunoadherence or flow cytometry that uses a cocktail of monoclonal antibodies directed to cell surface markers present on the cells negatively selected. For example, to enrich for CD4⁺ cells by negative selection, a monoclonal antibody cocktail typically includes antibodies to CD14, CD20, CD11b, CD 16, HLA-DR, and CD8. In certain embodiments, it may be desirable to enrich for or positively select for regulatory T cells which typically express CD4⁺, CD25⁺, CD62L^{hi}, GITR⁺, and FoxP3⁺. Alternatively, in certain embodiments, T regulatory cells are depleted by anti-CD25 conjugated beads or other similar method of selection.

[0290] For isolation of a desired population of cells by positive or negative selection, the concentration of cells and surface (e.g., particles such as beads) can be varied. In certain embodiments, it may be desirable to significantly decrease the volume in which beads and cells are mixed together (i.e., increase the concentration of cells), to ensure maximum contact of cells and beads. For example, in one embodiment, a concentration of 2 billion cells/ml is used. In one embodiment, a concentration of 1 billion cells/ml is used. In a further embodiment, greater than 100 million cells/ml is used. In a further embodiment, a concentration of cells of 10, 15, 20, 25, 30, 35, 40, 45, or 50 million cells/ml is used. In yet another embodiment, a concentration of cells from 75, 80, 85, 90, 95, or 100 million cells/ml is used. In further embodiments, concentrations of 125 or 150 million cells/ml can be used. Using high concentrations can result in increased cell yield, cell activation, and cell expansion. Further, use of high cell concentrations allows more efficient capture of cells that may weakly express target antigens of interest, such as CD28-negative T cells, or from samples where there are many tumor cells present (i.e., leukemic blood, tumor tissue, etc.). Such populations of cells may have therapeutic value and would be desirable to obtain. For example, using high concentration of cells allows more efficient selection of CD8⁺ T cells that normally have weaker CD28 expression.

[0291] In a related embodiment, it may be desirable to use lower concentrations of cells. By significantly diluting the mixture of T cells and surface (e.g., particles such as beads), interactions between the particles and cells is minimized. This selects for cells that express high amounts of desired antigens to be bound to the particles. For example, CD4⁺ T cells express higher levels of CD28 and are more efficiently captured than CD8⁺ T cells in dilute concentrations. In one embodiment, the concentration of cells used is 5×10⁶/ml. In other embodiments, the concentration used can be from about 1×10⁵/ml to 1×10⁶/ml, and any integer value in between.

[0292] In other embodiments, the cells may be incubated on a rotator for varying lengths of time at varying speeds at either 2-10° C. or at room temperature.

[0293] T cells for stimulation can also be frozen after a washing step. Wishing not to be bound by theory, the freeze and subsequent thaw step provides a more uniform product by removing granulocytes and to some extent monocytes in the cell population. After the washing step that removes plasma and platelets, the cells may be suspended in a freezing solution. While many freezing solutions and parameters are known in the art and will be useful in this context, one method involves using PBS containing 20% DMSO and 8% human serum albumin, or culture media containing 10% Dextran 40 and 5% Dextrose, 20% Human Serum Albumin and 7.5% DMSO, or 31.25% Plasmalyte-A, 31.25% Dextrose 5%, 0.45% NaCl, 10% Dextran 40 and 5% Dextrose, 20% Human Serum Albumin, and 7.5% DMSO or other suitable cell freezing media containing for example, Hespan and PlasmaLyte A, the cells then are frozen to −80° C. at a rate of 1° C. per minute and stored in the vapor phase of a liquid nitrogen storage tank. Other methods of controlled freezing may be used as well as uncontrolled freezing immediately at −20° C. or in liquid nitrogen.

In certain embodiments, cryopreserved cells are thawed and washed as described herein and allowed to rest for one hour at room temperature prior to activation using the methods of the present invention.

[0294] Also contemplated in the context of the invention is the collection of blood samples or apheresis product from a subject at a time period prior to when the expanded cells as described herein might be needed. As such, the source of the cells to be expanded can be collected at any time point necessary, and desired cells, such as T cells, isolated and frozen for later use in T cell therapy for any number of diseases or conditions that would benefit from T cell therapy, such as those described herein. In one embodiment a blood sample or an apheresis is taken from a generally healthy subject. In certain embodiments, a blood sample or an apheresis is taken from a generally healthy subject who is at risk of developing a disease, but who has not yet developed a disease, and the cells of interest are isolated and frozen for later use. In certain embodiments, the T cells may be expanded, frozen, and used at a later time. In certain embodiments, samples are collected from a patient shortly after diagnosis of a particular disease as described herein but prior to any treatments. In a further embodiment, the cells are isolated from a blood sample or an apheresis from a subject prior to any number of relevant treatment modalities, including but not limited to treatment with agents such as natalizumab, efalizumab, antiviral agents, chemotherapy, radiation, immunosuppressive agents, such as cyclosporin, azathioprine, methotrexate, mycophenolate, and FK506, antibodies, or other immunoablative agents such as CAMPATH, anti-CD3 antibodies, cytoxan, fludarabine, cyclosporin, FK506, rapamycin, mycophenolic acid, steroids, FR901228, and irradiation. These drugs inhibit either the calcium dependent phosphatase calcineurin (cyclosporine and FK506) or inhibit the p70S6 kinase that is important for growth factor induced signaling (rapamycin) (Liu et al., Cell 66:807-815, 1991; Henderson et al., Immun. 73:316-321, 1991; Bierer et al., Curr. Opin. Immun. 5:763-773, 1993). In a further embodiment, the cells are isolated for a patient and frozen for later use in conjunction with (e.g., before, simultaneously or following) bone marrow or stem cell transplantation, T cell ablative therapy using either chemotherapy agents such as, fludarabine, external-beam radiation therapy (XRT), cyclophosphamide, or antibodies such as OKT3 or CAMPATH. In another embodiment, the cells are isolated prior to and can be frozen for later use for treatment following B-cell ablative therapy such as agents that react with CD20, e.g., Rituxan.

[0295] In a further embodiment of the present invention, T cells are obtained from a patient directly following treatment. In this regard, it has been observed that following certain cancer treatments, in particular treatments with drugs that damage the immune system, shortly after treatment during the period when patients would normally be recovering from the treatment, the quality of T cells obtained may be optimal or improved for their ability to expand ex vivo. Likewise, following ex vivo manipulation using the methods described herein, these cells may be in a preferred state for enhanced engraftment and in vivo expansion. Thus, it is contemplated within the context of the present invention to collect blood cells, including T cells, natural killer cells, dendritic cells, or other cells of the hematopoietic lineage, during this recovery phase. Further, in certain embodiments, mobilization (for example, mobilization with GM-CSF) and conditioning regimens can be used to create a condition in a subject wherein repopulation, recirculation, regeneration, and/or expansion of particular cell types is favored, especially during a defined window of time following therapy. Illustrative cell types include T cells, B cells, dendritic cells, and other cells of the immune system.

[0296] According to some embodiments of the invention, the T cell is autologous to the subject.

[0297] As used herein, the term “autologous” is meant to refer to any material derived from the same individual to which it is later to be re-introduced into the individual.

[0298] According to some embodiments of the invention, the T cell is semi-autologous to the subject.

[0299] According to some embodiments of the invention, the T cell is non-autologous (e.g., allogeneic) to the subject.

[0300] “Allogeneic” refers to a graft derived from a different individual.

[0301] Activation and Expansion of T Cells

[0302] “Activation”, as used herein, refers to the state of a T cell that has been sufficiently stimulated to induce detectable cellular proliferation. Activation can also be associated with induced cytokine production, and detectable effector functions. The term “activated T cells” refers to, among other things, T cells that are undergoing cell division.

[0303] Whether prior to or after genetic modification of the T cells to express a desirable CAR molecule, the T cells can be activated and expanded generally using methods as described, for example, in U.S. Pat. Nos. 6,352,694; 6,534,055; 6,905,680; 6,692,964; 5,858,358; 6,887,466; 6,905,681; 7,144,575; 7,067,318; 7,172,869; 7,232,566; 7,175,843; 5,883,223; 6,905,874; 6,797,514; 6,867,041; and U.S. Patent Application Publication No. 20060121005.

[0304] Generally, the T cells of the invention are expanded by contact with a surface having attached thereto an agent that stimulates a CD3/TCR complex associated signal and a ligand that stimulates a co-stimulatory molecule on the surface of the T cells. In particular, T cell populations may be stimulated as described herein, such as by contact with an anti-CD3 antibody, or antigen-binding fragment thereof, or au anti-CD2 antibody immobilized on a surface, or by contact with a protein kinase C activator (e.g., bryostatin) in conjunction with a calcium ionophore. For co-stimulation of an accessory molecule on the surface of the T cells, a ligand that binds the accessory molecule is used. For example, a population of T cells can be contacted with an anti-CD3 antibody and an anti-CD28 antibody, under conditions appropriate for stimulating proliferation of the T cells. To stimulate proliferation of either CD4⁺ T cells or CD8⁺ T cells, an anti-CD3 antibody and an anti-CD28 antibody. Examples of an anti-CD28 antibody include 9.3, B-T3, XR-CD28 (Diaclone, Besancon, France) can be used as can other methods commonly known in the art (Berg et al., Transplant Proc. 30(8):3975-3977, 1998; Haanen et al., J. Exp. Med. 190(9):13191328, 1999; Garland et al., J. Immunol. Meth. 227(1-2):53-63, 1999).

[0305] In certain embodiments, the primary stimulatory signal and the co-stimulatory signal for the T cell may be provided by different protocols. For example, the agents providing each signal may be in solution or coupled to a surface. When coupled to a surface, the agents may be coupled to the same surface (i.e., in “cis” formation) or to separate surfaces (i.e., in “trans” formation). Alternatively, one agent may be coupled to a surface and the other agent in solution. In one embodiment, the agent providing the co-stimulatory signal is bound to a cell surface and the agent providing the primary activation signal is in solution or coupled to a surface. In certain embodiments, both agents can be in solution. In another embodiment, the agents may be in soluble form, and then cross-linked to a surface, such as a cell expressing Fc receptors or an antibody or other binding agent which will bind to the agents. In this regard, see for example, U.S. Patent Application Publication Nos. 20040101519 and 20060034810 for artificial antigen presenting cells (aAPCs) that are contemplated for use in activating and expanding T cells in the present invention.

[0306] In one embodiment, the two agents are immobilized on beads, either on the same bead, i.e., “cis,” or to separate beads, i.e., “trans.” By way of example, the agent providing the primary activation signal is an anti-CD3 antibody or an antigen-binding fragment thereof and the agent providing the co-stimulatory signal is an anti-CD28 antibody or antigen-binding fragment thereof; and both agents are co-immobilized to the same bead in equivalent molecular amounts. In one embodiment, a 1:1 ratio of each antibody bound to the beads for CD4⁺ T cell expansion and T cell growth is used. In certain aspects of the present invention, a ratio of anti CD3:CD28 antibodies bound to the beads is used such that an increase in T cell expansion is observed as compared to the expansion observed using a ratio of 1:1. In one particular embodiment an increase of from about 1 to about 3 fold is observed as compared to the expansion observed using a ratio of 1:1. In one embodiment, the ratio of CD3:CD28 antibody bound to the beads ranges from 100:1 to 1:100 and all integer values there between. In one aspect of the present invention, more anti-CD28 antibody is bound to the particles than anti-CD3 antibody, i.e., the ratio of CD3:CD28 is less than one. In certain embodiments of the invention, the ratio of anti CD28 antibody to anti CD3 antibody bound to the beads is greater than 2:1. In one particular embodiment, a 1:100 CD3:CD28 ratio of antibody bound to beads is used. In another embodiment, a 1:75 CD3:CD28 ratio of antibody bound to beads is used. In a further embodiment, a 1:50 CD3:CD28 ratio of antibody bound to beads is used. In another embodiment, a 1:30 CD3:CD28 ratio of antibody bound to beads is used. In one preferred embodiment, a 1:10 CD3:CD28 ratio of antibody bound to beads is used. In another embodiment, a 1:3 CD3:CD28 ratio of antibody bound to the beads is used. In yet another embodiment, a 3:1 CD3:CD28 ratio of antibody bound to the beads is used.

[0307] Ratios of particles to cells from 1:500 to 500:1 and any integer values in between may be used to stimulate T cells or other target cells. As those of ordinary skill in the art can readily appreciate, the ratio of particles to cells may depend on particle size relative to the target cell. For example, small sized beads could only bind a few cells, while larger beads could bind many. In certain embodiments the ratio of cells to particles ranges from 1:100 to 100:1 and any integer values in-between and in further embodiments the ratio comprises 1:9 to 9:1 and any integer values in between, can also be used to stimulate T cells. The ratio of anti-CD3- and anti-CD28-coupled particles to T cells that result in T cell stimulation can vary as noted above, however certain preferred values include 1:100, 1:50, 1:40, 1:30, 1:20, 1:10, 1:9, 1:8, 1:7, 1:6, 1:5, 1:4, 1:3, 1:2, 1:1, 2:1, 3:1, 4:1, 5:1, 6:1, 7:1, 8:1, 9:1, 10:1, and 15:1 with one preferred ratio being at least 1:1 particles per T cell. In one embodiment, a ratio of particles to cells of 1:1 or less is used. In one particular embodiment, a preferred particle:cell ratio is 1:5. In further embodiments, the ratio of particles to cells can be varied depending on the day of stimulation. For example, in one embodiment, the ratio of particles to cells is from 1:1 to 10:1 on the first day and additional particles are added to the cells every day or every other day thereafter for up to 10 days, at final ratios of from 1:1 to 1:10 (based on cell counts on the day of addition). In one particular embodiment, the ratio of particles to cells is 1:1 on the first day of stimulation and adjusted to 1:5 on the third and fifth days of stimulation. In another embodiment, particles are added on a daily or every other day basis to a final ratio of 1:1 on the first day, and 1:5 on the third and fifth days of stimulation. In another embodiment, the ratio of particles to cells is 2:1 on the first day of stimulation and adjusted to 1:10 on the third and fifth days of stimulation. In another embodiment, particles are added on a daily or every other day basis to a final ratio of 1:1 on the first day, and 1:10 on the third and fifth days of stimulation. One of skill in the art will appreciate that a variety of other ratios may be suitable for use in the present invention. In particular, ratios will vary depending on particle size and on cell size and type.

[0308] In further embodiments of the present invention, the cells, such as T cells, are combined with agent-coated beads, the beads and the cells are subsequently separated, and then the cells are cultured. In an alternative embodiment, prior to culture, the agent-coated beads and cells are not separated but are cultured together. In a further embodiment, the beads and cells are first concentrated by application of a force, such as a magnetic force, resulting in increased ligation of cell surface markers, thereby inducing cell stimulation.

[0309] By way of example, cell surface proteins may be ligated by allowing paramagnetic beads to which anti-CD3 and anti-CD28 are attached to contact the T cells. In one embodiment the cells (for example, 10⁴ to 10⁹ T cells) and beads (for example, DYNABEADS® M-450 CD3/CD28 T paramagnetic beads at a ratio of 1:1) are combined in a buffer, preferably PBS (without divalent cations such as, calcium and magnesium). Again, those of ordinary skill in the art can readily appreciate any cell concentration may be used. For example, the target cell may be very rare in the sample and comprise only 0.01% of the sample or the entire sample (i.e., 100%) may comprise the target cell of interest. Accordingly, any cell number is within the context of the present invention. In certain embodiments, it may be desirable to significantly decrease the volume in which particles and cells are mixed together (i.e., increase the concentration of cells), to ensure maximum contact of cells and particles. For example, in one embodiment, a concentration of about 2 billion cells/ml is used. In another embodiment, greater than 100 million cells/ml is used. In a further embodiment, a concentration of cells of 10, 15, 20, 25, 30, 35, 40, 45, or 50 million cells/ml is used. In yet another embodiment, a concentration of cells from 75, 80, 85, 90, 95, or 100 million cells/ml is used. In further embodiments, concentrations of 125 or 150 million cells/ml can be used. Using high concentrations can result in increased cell yield, cell activation, and cell expansion. Further, use of high cell concentrations allows more efficient capture of cells that may weakly express target antigens of interest, such as CD28-negative T cells. Such populations of cells may have therapeutic value and would be desirable to obtain in certain embodiments. For example, using high concentration of cells allows more efficient selection of CD8⁺ T cells that normally have weaker CD28 expression.

[0310] In one embodiment of the present invention, the mixture may be cultured for several hours (about 3 hours) to about 14 days or any hourly integer value in between. In another embodiment, the mixture may be cultured for 21 days. In one embodiment of the invention the beads and the T cells are cultured together for about eight days. In another embodiment, the beads and T cells are cultured together for 2-3 days. Several cycles of stimulation may also be desired such that culture time of T cells can be 60 days or more. Conditions appropriate for T cell culture include an appropriate media (e.g., Minimal Essential Media or RPMI Media 1640 or, X-vivo 15, (Lonza)) that may contain factors necessary for proliferation and viability, including serum (e.g., fetal bovine or human serum), interleukin-2 (IL-2), insulin, IFN-.gamma., IL-4, IL-7, GM-CSF, IL-10, IL-12, IL-15, TGFβ, and TNF-α or any other additives for the growth of cells known to the skilled artisan. Other additives for the growth of cells include, but are not limited to, surfactant, plasmanate, and reducing agents such as N-acetyl-cysteine and 2-mercaptoethanol. Media can include RPMI 1640, AIM-V, DMEM, MEM, α-MEM, F-12, X-Vivo 15, and X-Vivo 20, Optimizer, with added amino acids, sodium pyruvate, and vitamins, either serum-free or supplemented with an appropriate amount of serum (or plasma) or a defined set of hormones, and/or an amount of cytokine(s) sufficient for the growth and expansion of T cells. Antibiotics, e.g., penicillin and streptomycin, are included only in experimental cultures, not in cultures of cells that are to be infused into a subject. The target cells are maintained under conditions necessary to support growth, for example, an appropriate temperature (e.g., 37° C.) and atmosphere (e.g., air plus 5% CO₂).

[0311] T cells that have been exposed to varied stimulation times may exhibit different characteristics. For example, typical blood or apheresed peripheral blood mononuclear cell products have a helper T cell population (T_{H}, CD4⁺) that is greater than the cytotoxic or suppressor T cell population (Tc, CD8⁺). Ex vivo expansion of T cells by stimulating CD3 and CD28 receptors produces a population of T cells that prior to about days 8-9 consists predominately of T_{H} cells, while after about days 8-9, the population of T cells comprises an increasingly greater population of T_{C} cells. Accordingly, depending on the purpose of treatment, infusing a subject with a T cell population comprising predominately of T_{H} cells may be advantageous. Similarly, if an antigen-specific subset of T_{C} cells has been isolated it may be beneficial to expand this subset to a greater degree.

[0312] Further, in addition to CD4 and CD8 markers, other phenotypic markers vary significantly, but in large part, reproducibly during the course of the cell expansion process. Thus, such reproducibility enables the ability to tailor an activated T cell product for specific purposes.

[0313] Thus, according to an aspect of some embodiments of the invention there is provided a pharmaceutical composition comprising the CAR molecule of some embodiments of the invention, the isolated polynucleotide of some embodiments of the invention, the nucleic acid construct of some embodiments of the invention and/or the cell of some embodiments of the invention and a pharmaceutically acceptable carrier.

[0314] As used herein a “pharmaceutical composition” refers to a preparation of one or more of the active ingredients described herein with other chemical components such as physiologically suitable carriers and excipients. The purpose of a pharmaceutical composition is to facilitate administration of a compound to an organism.

[0315] Herein the term “active ingredient” refers to the CAR molecule of some embodiments of the invention the isolated polynucleotide of some embodiments of the invention, the nucleic acid construct of some embodiments of the invention and/or the cell of some embodiments of the invention accountable for the biological effect.

[0316] Hereinafter, the phrases “physiologically acceptable carrier” and “pharmaceutically acceptable carrier” which may be interchangeably used refer to a carrier or a diluent that does not cause significant irritation to an organism and does not abrogate the biological activity and properties of the administered compound. An adjuvant is included under these phrases.

[0317] Herein the term “excipient” refers to an inert substance added to a pharmaceutical composition to further facilitate administration of an active ingredient. Examples, without limitation, of excipients include calcium carbonate, calcium phosphate, various sugars and types of starch, cellulose derivatives, gelatin, vegetable oils and polyethylene glycols.

[0318] Techniques for formulation and administration of drugs may be found in “Remington's Pharmaceutical Sciences,” Mack Publishing Co., Easton, Pa., latest edition, which is incorporated herein by reference.

Suitable routes of administration may, for example, include oral, rectal, transmucosal, especially transnasal, intestinal or parenteral delivery, including intramuscular, subcutaneous and intramedullary injections as well as intrathecal, direct intraventricular, intravenous, intraperitoneal, intranasal, or intraocular injections.

[0319] Alternately, one may administer the pharmaceutical composition in a local rather than systemic manner, for example, via injection of the pharmaceutical composition directly into a tissue region of a patient.

[0320] Pharmaceutical compositions of the invention may be manufactured by processes well known in the art, e.g., by means of conventional mixing, dissolving, granulating, dragee-making, levigating, emulsifying, encapsulating, entrapping or lyophilizing processes.

[0321] Pharmaceutical compositions for use in accordance with the invention thus may be formulated in conventional manner using one or more physiologically acceptable carriers comprising excipients and auxiliaries, which facilitate processing of the active ingredients into preparations which, can be used pharmaceutically. Proper formulation is dependent upon the route of administration chosen.

For injection, the active ingredients of the pharmaceutical composition may be formulated in aqueous solutions, preferably in physiologically compatible buffers such as Hank's solution, Ringer's solution, or physiological salt buffer. For transmucosal administration, penetrants appropriate to the barrier to be permeated are used in the formulation. Such penetrants are generally known in the art.

[0322] The administration of the pharmaceutical composition may be carried out in any convenient manner, including by aerosol inhalation, injection, ingestion, transfusion, implantation or transplantation. The compositions described herein may be administered to a patient subcutaneously, intradermally, intratumorally, intranodally, intramedullary, intramuscularly, by intravenous (i.v.) injection, or intraperitoneally. In one embodiment, the pharmaceutical composition of the present invention is administered to a patient by intradermal or subcutaneous injection. In another embodiment, the pharmaceutical composition of the present invention is preferably administered by i.v. injection. The pharmaceutical composition may be injected directly into a tumor, lymph node, or site of infection.

[0323] For oral administration, the pharmaceutical composition can be formulated readily by combining the active compounds with pharmaceutically acceptable carriers well known in the art. Such carriers enable the pharmaceutical composition to be formulated as tablets, pills, dragees, capsules, liquids, gels, syrups, slurries, suspensions, and the like, for oral ingestion by a patient. Pharmacological preparations for oral use can be made using a solid excipient, optionally grinding the resulting mixture, and processing the mixture of granules, after adding suitable auxiliaries if desired, to obtain tablets or dragee cores. Suitable excipients are, in particular, fillers such as sugars, including lactose, sucrose, mannitol, or sorbitol; cellulose preparations such as, for example, maize starch, wheat starch, rice starch, potato starch, gelatin, gum tragacanth, methyl cellulose, hydroxypropylmethyl-cellulose, sodium carbomethylcellulose; and/or physiologically acceptable polymers such as polyvinylpyrrolidone (PVP). If desired, disintegrating agents may be added, such as cross-linked polyvinyl pyrrolidone, agar, or alginic acid or a salt thereof such as sodium alginate.

[0324] Dragee cores are provided with suitable coatings. For this purpose, concentrated sugar solutions may be used which may optionally contain gum arabic, talc, polyvinyl pyrrolidone, carbopol gel, polyethylene glycol, titanium dioxide, lacquer solutions and suitable organic solvents or solvent mixtures. Dyestuffs or pigments may be added to the tablets or dragee coatings for identification or to characterize different combinations of active compound doses.

[0325] Pharmaceutical compositions which can be used orally, include push-fit capsules made of gelatin as well as soft, sealed capsules made of gelatin and a plasticizer, such as glycerol or sorbitol. The push-fit capsules may contain the active ingredients in admixture with filler such as lactose, binders such as starches, lubricants such as talc or magnesium stearate and, optionally, stabilizers. In soft capsules, the active ingredients may be dissolved or suspended in suitable liquids, such as fatty oils, liquid paraffin, or liquid polyethylene glycols. In addition, stabilizers may be added. All formulations for oral administration should be in dosages suitable for the chosen route of administration.

[0326] For buccal administration, the compositions may take the form of tablets or lozenges formulated in conventional manner.

[0327] For administration by nasal inhalation, the active ingredients for use according to the invention are conveniently delivered in the form of an aerosol spray presentation from a pressurized pack or a nebulizer with the use of a suitable propellant, e.g., dichlorodifluoromethane, trichlorofluoromethane, dichloro-tetrafluoroethane or carbon dioxide. In the case of a pressurized aerosol, the dosage unit may be determined by providing a valve to deliver a metered amount. Capsules and cartridges of, e.g., gelatin for use in a dispenser may be formulated containing a powder mix of the compound and a suitable powder base such as lactose or starch.

[0328] The pharmaceutical composition described herein may be formulated for parenteral administration, e.g., by bolus injection or continuous infusion. Formulations for injection may be presented in unit dosage form, e.g., in ampoules or in multidose containers with optionally, an added preservative. The compositions may be suspensions, solutions or emulsions in oily or aqueous vehicles, and may contain formulatory agents such as suspending, stabilizing and/or dispersing agents.

[0329] Pharmaceutical compositions for parenteral administration include aqueous solutions of the active preparation in water-soluble form. Additionally, suspensions of the active ingredients may be prepared as appropriate oily or water based injection suspensions. Suitable lipophilic solvents or vehicles include fatty oils such as sesame oil, or synthetic fatty acids esters such as ethyl oleate, triglycerides or liposomes. Aqueous injection suspensions may contain substances, which increase the viscosity of the suspension, such as sodium carboxymethyl cellulose, sorbitol or dextran. Optionally, the suspension may also contain suitable stabilizers or agents which increase the solubility of the active ingredients to allow for the preparation of highly concentrated solutions.

[0330] Alternatively, the active ingredient may be in powder form for constitution with a suitable vehicle, e.g., sterile, pyrogen-free water based solution, before use. The pharmaceutical composition of the invention may also be formulated in rectal compositions such as suppositories or retention enemas, using, e.g., conventional suppository bases such as cocoa butter or other glycerides.

[0331] Pharmaceutical compositions suitable for use in context of the invention include compositions wherein the active ingredients are contained in an amount effective to achieve the intended purpose. More specifically, a therapeutically effective amount means an amount of active ingredients effective to prevent, alleviate or ameliorate symptoms of a pathology or prolong the survival of the subject being treated.

[0332] Determination of a therapeutically effective amount is well within the capability of those skilled in the art, especially in light of the detailed disclosure provided herein.

[0333] When “an immunologically effective amount”, “an anti-tumor effective amount”, “an tumor-inhibiting effective amount”, or “therapeutic amount” is indicated, the precise amount of the compositions of the present invention to be administered can be determined by a physician with consideration of individual differences in age, weight, tumor size, extent of infection or metastasis, and condition of the patient (subject). It can generally be stated that a pharmaceutical composition comprising the T cells or NK cells described herein may be administered at a dosage of 10⁴ to 10⁹ cells/kg body weight, preferably 10⁵ to 10⁶ cells/kg body weight, including all integer values within those ranges. T cell compositions may also be administered multiple times at these dosages. The cells can be administered by using infusion techniques that are commonly known in immunotherapy (see, e.g., Rosenberg et al., New Eng. J. of Med. 319:1676, 1988). The optimal dosage and treatment regime for a particular patient can readily be determined by one skilled in the art of medicine by monitoring the patient for signs of disease and adjusting the treatment accordingly.

[0334] For example, the effect of the active ingredients (e.g., the isolated polynucleotide of some embodiments of the invention, the nucleic acid construct of some embodiments of the invention or the cell of some embodiments of the invention) on the pathology can be evaluated by monitoring the level of markers, e.g., hormones, glucose, peptides, carbohydrates, etc. in a biological sample of the treated subject using well known methods.

[0335] In certain embodiments, it may be desired to administer activated T cells to a subject and then subsequently redraw blood (or have an apheresis performed), activate T cells therefrom according to the present invention, and reinfuse the patient with these activated and expanded T cells. This process can be carried out multiple times every few weeks. In certain embodiments, T cells can be activated from blood draws of from 10 cc to 400 cc. In certain embodiments, T cells are activated from blood draws of 20 cc, 30 cc, 40 cc, 50 cc, 60 cc, 70 cc, 80 cc, 90 cc, or 100 cc. Not to be bound by theory, using this multiple blood draw/multiple reinfusion protocol may serve to select out certain populations of T cells.

[0336] For any preparation used in the methods of the invention, the therapeutically effective amount or dose can be estimated initially from in vitro and cell culture assays. For example, a dose can be formulated in animal models to achieve a desired concentration or titer. Such information can be used to more accurately determine useful doses in humans.

[0337] Toxicity and therapeutic efficacy of the active ingredients described herein can be determined by standard pharmaceutical procedures in vitro, in cell cultures or experimental animals. The data obtained from these in vitro and cell culture assays and animal studies can be used in formulating a range of dosage for use in human. The dosage may vary depending upon the dosage form employed and the route of administration utilized. The exact formulation, route of administration and dosage can be chosen by the individual physician in view of the patient's condition. (See e.g., Fingl, et al., 1975, in “The Pharmacological Basis of Therapeutics”, Ch. 1 p. 1).

[0338] Dosage amount and interval may be adjusted individually to provide plasma or brain levels of the active ingredient are sufficient to induce or suppress the biological effect (minimal effective concentration, MEC). The MEC will vary for each preparation, but can be estimated from in vitro data. Dosages necessary to achieve the MEC will depend on individual characteristics and route of administration. Detection assays can be used to determine plasma concentrations.

[0339] Depending on the severity and responsiveness of the condition to be treated, dosing can be of a single or a plurality of administrations, with course of treatment lasting from several days to several weeks or until cure is effected or diminution of the disease state is achieved.

[0340] The amount of a composition to be administered will, of course, be dependent on the subject being treated, the severity of the affliction, the manner of administration, the judgment of the prescribing physician, etc.

[0341] According to some embodiments of the invention, the therapeutic agent of the invention can be provided to the subject in conjunction with other drug(s) designed for treating the pathology [combination therapy, (e.g., before, simultaneously or following)].

[0342] In certain embodiments of the present invention, cells activated and expanded using the methods described herein, or other methods known in the art where T cells are expanded to therapeutic levels, are administered to a patient in conjunction with any number of relevant treatment modalities, including but not limited to treatment with agents such as antiviral therapy, cidofovir and interleukin-2, Cytarabine (also known as ARA-C) or natalizumab treatment for MS patients or efalizumab treatment for psoriasis patients or other treatments for PML patients. In further embodiments, the T cells of the invention may be used in combination with chemotherapy, radiation, immunosuppressive agents, such as cyclosporin, azathioprine, methotrexate, mycophenolate, and FK506, antibodies, or other immunoablative agents such as CAM PATH, anti-CD3 antibodies or other antibody therapies, cytoxin, fludaribine, cyclosporin, FK506, rapamycin, mycophenolic acid, steroids, FR901228, cytokines, and irradiation. These drugs inhibit either the calcium dependent phosphatase calcineurin (cyclosporine and FK506) or inhibit the p70S6 kinase that is important for growth factor induced signaling (rapamycin) (Liu et al., Cell 66:807-815, 1991; Henderson et al., Immun. 73:316-321, 1991; Bierer et al., Curr. Opin. Immun. 5:763-773, 1993). In a further embodiment, the cell compositions of the present invention are administered to a patient in conjunction with (e.g., before, simultaneously or following) bone marrow transplantation, T cell ablative therapy using either chemotherapy agents such as, fludarabine, external-beam radiation therapy (XRT), cyclophosphamide, or antibodies such as OKT3 or CAMPATH. In another embodiment, the cell compositions of the present invention are administered following B-cell ablative therapy such as agents that react with CD20, e.g., Rituxan. For example, in one embodiment, subjects may undergo standard treatment with high dose chemotherapy followed by peripheral blood stem cell transplantation. In certain embodiments, following the transplant, subjects receive an infusion of the expanded immune cells of the present invention. In an additional embodiment, expanded cells are administered before or following surgery.

[0343] The combination therapy may increase the therapeutic effect of the agent of the invention in the treated subject.

[0344] Compositions of the invention may, if desired, be presented in a pack or dispenser device, such as an FDA approved kit, which may contain one or more unit dosage forms containing the active ingredient. The pack may, for example, comprise metal or plastic foil, such as a blister pack. The pack or dispenser device may be accompanied by instructions for administration. The pack or dispenser may also be accommodated by a notice associated with the container in a form prescribed by a governmental agency regulating the manufacture, use or sale of pharmaceuticals, which notice is reflective of approval by the agency of the form of the compositions or human or veterinary administration. Such notice, for example, may be of labeling approved by the U.S. Food and Drug Administration for prescription drugs or of an approved product insert. Compositions comprising a preparation of the invention formulated in a compatible pharmaceutical carrier may also be prepared, placed in an appropriate container, and labeled for treatment of an indicated condition, as if further detailed above.

[0345] According to an aspect of some embodiments of the invention, there is provided an in vitro method of generating a medicament for treating a pathology in a subject in need thereof, comprising:

[0346] (a) obtaining T cells or natural killer (NK) cells,

[0347] (b) transducing the T cells or the natural killer cells with the nucleic acid construct of some embodiments of the invention, wherein binding of the molecule to the antigen elicits a therapeutic response by the T cells or the natural killer of the subject,

[0348] thereby generating the medicament for treating the pathology.

[0349] According to some embodiments of the invention, the T cells or the natural killer cells are obtained from peripheral blood mononuclear cells (PBMCs) of the subject in need thereof.

[0350] The term “transfected” or “transformed” or “transduced” as used herein refers to a process by which exogenous nucleic acid is transferred or introduced into the host cell. A “transfected” or “transformed” or “transduced” cell is one which has been transfected, transformed or transduced with exogenous nucleic acid. The cell includes the primary subject cell and its progeny.

[0351] According to an aspect of some embodiments of the invention, there is provided a method of treating a pathology in a subject in need thereof, comprising administering the medicament resultant of the method of some embodiments of the invention in the subject, thereby treating the pathology in the subject.

[0352] The term “treating” refers to inhibiting, preventing or arresting the development of a pathology (disease, disorder or condition) and/or causing the reduction, remission, or regression of a pathology. Those of skill in the art will understand that various methodologies and assays can be used to assess the development of a pathology, and similarly, various methodologies and assays may be used to assess the reduction, remission or regression of a pathology.

[0353] As used herein, the term “subject” includes mammals, preferably human beings at any age which suffer from the pathology.

[0354] The pathology can be, but is not limited to, cancer, viral infection, bacterial and parasitic infections, and/or an autoimmune disease.

[0355] According to some embodiments of the invention, the pathology is cancer. The term “cancer” as used herein is defined as disease characterized by the rapid and uncontrolled growth of aberrant cells. Cancer cells can spread locally or through the bloodstream and lymphatic system to other parts of the body.

[0356] The cancer may be a hematological malignancy, a solid tumor, a primary or a metatastizing tumor. Examples of various cancers include but are not limited to, breast cancer, prostate cancer, ovarian cancer, cervical cancer, skin cancer, pancreatic cancer, colorectal cancer, renal cancer, liver cancer, brain cancer, lymphoma, Chronic Lymphocytic Leukemia (CLL), leukemia, lung cancer and the like. Additional non-limiting examples of cancers which can be treated by the method of some embodiments of the invention are provided in Tables 1, 15-19 above.

[0357] Cancers that may be treated include tumors that are not vascularized, or not yet substantially vascularized, as well as vascularized tumors. The cancers may comprise non-solid tumors (such as hematological tumors, for example, leukemias and lymphomas) or may comprise solid tumors. Types of cancers to be treated with the CARs of the invention include, but are not limited to, carcinoma, blastoma, and sarcoma, and certain leukemia or lymphoid malignancies, benign and malignant tumors, and malignancies e.g., sarcomas, carcinomas, and melanomas. Adult tumors/cancers and pediatric tumors/cancers are also included.

[0358] Hematologic cancers are cancers of the blood or bone marrow. Examples of hematological (or hematogenous) cancers include leukemias, including acute leukemias (such as acute lymphocytic leukemia, acute myelocytic leukemia, acute myelogenous leukemia and myeloblastic, promyelocytic, myelomonocytic, monocytic and erythroleukemia), chronic leukemias (such as chronic myelocytic (granulocytic) leukemia, chronic myelogenous leukemia, and chronic lymphocytic leukemia), polycythemia vera, lymphoma, Hodgkin's disease, non-Hodgkin's lymphoma (indolent and high grade forms), multiple myeloma, Waldenstrom's macroglobulinemia, heavy chain disease, myelodysplastic syndrome, hairy cell leukemia and myelodysplasia. Solid tumors are abnormal masses of tissue that usually do not contain cysts or liquid areas. Solid tumors can be benign or malignant. Different types of solid tumors are named for the type of cells that form them (such as sarcomas, carcinomas, and lymphomas). Examples of solid tumors, such as sarcomas and carcinomas, include fibrosarcoma, myxosarcoma, liposarcoma, chondrosarcoma, osteosarcoma, and other sarcomas, synovioma, mesothelioma, Ewing's tumor, leiomyosarcoma, rhabdomyosarcoma, colon carcinoma, lymphoid malignancy, pancreatic cancer, breast cancer, lung cancers, ovarian cancer, prostate cancer, hepatocellular carcinoma, squamous cell carcinoma, basal cell carcinoma, adenocarcinoma, sweat gland carcinoma, medullary thyroid carcinoma, papillary thyroid carcinoma, pheochromocytomas sebaceous gland carcinoma, papillary carcinoma, papillary adenocarcinomas, medullary carcinoma, bronchogenic carcinoma, renal cell carcinoma, hepatoma, bile duct carcinoma, choriocarcinoma, Wilms' tumor, cervical cancer, testicular tumor, seminoma, bladder carcinoma, melanoma, and CNS tumors (such as a glioma (such as brainstem glioma and mixed gliomas), glioblastoma (also known as glioblastoma multiforme) astrocytoma, CNS lymphoma, germinoma, medulloblastoma, Schwannoma craniopharyogioma, ependymoma, pinealoma, hemangioblastoma, acoustic neuroma, oligodendroglioma, menangioma, neuroblastoma, retinoblastoma and brain metastases).

[0359] According to some embodiments of the invention, the pathology is a solid tumor.

[0360] According to some embodiments of the invention, the medicament resultant of the method of some embodiments of the invention has an anti-tumor effect.

[0361] The term “anti-tumor effect” as used herein, refers to a biological effect which can be manifested by a decrease in tumor volume, a decrease in the number of tumor cells, a decrease in the number of metastases, an increase in life expectancy, or amelioration of various physiological symptoms associated with the cancerous condition. An “anti-tumor effect” can also be manifested by the ability of the medicament of the invention in prevention of the occurrence of tumor in the first place.

[0362] According to some embodiments of the invention, the pathology is a viral infection.

[0363] Non-limiting examples of viral infections which can be treated by the medicament of some embodiments of the invention are described in Table 2 above.

[0364] According to some embodiments of the invention, the pathology is an autoimmune disease.

[0365] Non-limiting examples of autoimmune diseases which can be treated by the method and medicament of some embodiments of the invention include Addision's disease, alopecia greata, ankylosing spondylitis, autoimmune hepatitis, autoimmune parotitis, Celiac (Coeliac), Crohn's disease, diabetes (Type 1), dystrophic epidermolysis bullosa, epididymitis, glomerulonephritis, Graves' disease, Guillain-Barr syndrome, Hashimoto's disease, hemolytic anemia, systemic lupus erythematosus, multiple sclerosis, myasthenia gravis, pemphigus vulgaris, psoriasis, rheumatic fever, rheumatoid arthritis, sarcoidosis, scleroderma, Sjogren's syndrome, spondyloarthropathies, thyroiditis, vasculitis, vitiligo, myxedema, pernicious anemia, ulcerative colitis, stroke, among others.

[0366] The CAR-modified T cells of the invention may also serve as a type of vaccine for ex vivo immunization and/or in vivo therapy in a mammal. Preferably, the mammal is a human.

[0367] With respect to ex vivo immunization, of least one of the following occurs in vitro prior to administering the cell into a mammal: i) expansion of the cells, ii) introducing a nucleic acid encoding a CAR to the cells, and/or iii) cryopreservation of the cells.

[0368] Ex vivo procedures are well known in the art. Briefly, cells are isolated from a mammal (preferably a human) and genetically modified (i.e., transduced or transfected in vitro) with a vector expressing the CAR molecule of some embodiments of the invention. The CAR-modified cell can be administered to a mammalian recipient to provide a therapeutic benefit. The mammalian recipient may be a human and the CAR-modified cell can be autologous with respect to the recipient. Alternatively, the cells can be allogeneic, syngeneic or xenogeneic with respect to the recipient.

[0369] The procedure for ex vivo expansion of hematopoietic stem and progenitor cells is described in U.S. Pat. No. 5,199,942, incorporated herein by reference, can be applied to the cells of the present invention. Other suitable methods are known in the art, therefore the present invention is not limited to any particular method of ex vivo expansion of the cells. Briefly, ex vivo culture and expansion of T cells comprises: (1) collecting CD34+ hematopoietic stem and progenitor cells from a mammal from peripheral blood harvest or bone marrow explants; and (2) expanding such cells ex vivo. In addition to the cellular growth factors described in U.S. Pat. No. 5,199,942, other factors such as flt3-L, IL-1, IL-3 and c-kit ligand, can be used for culturing and expansion of the cells.

[0370] In addition to using a cell-based vaccine in terms of ex vivo immunization, the present invention also provides compositions and methods for in vivo immunization to elicit an immune response directed against an antigen in a patient.

[0371] As used herein the term “about” refers to ±10%

[0372] The terms “comprises”, “comprising”, “includes”, “including”, “having” and their conjugates mean “including but not limited to”.

[0373] The term “consisting of” means “including and limited to”.

[0374] The term “consisting essentially of” means that the composition, method or structure may include additional ingredients, steps and/or parts, but only if the additional ingredients, steps and/or parts do not materially alter the basic and novel characteristics of the claimed composition, method or structure.

[0375] As used herein, the singular form “a”, “an” and “the” include plural references unless the context clearly dictates otherwise. For example, the term “a compound” or “at least one compound” may include a plurality of compounds, including mixtures thereof.

[0376] Throughout this application, various embodiments of this invention may be presented in a range format. It should be understood that the description in range format is merely for convenience and brevity and should not be construed as an inflexible limitation on the scope of the invention. Accordingly, the description of a range should be considered to have specifically disclosed all the possible subranges as well as individual numerical values within that range. For example, description of a range such as from 1 to 6 should be considered to have specifically disclosed subranges such as from 1 to 3, from 1 to 4, from 1 to 5, from 2 to 4, from 2 to 6, from 3 to 6 etc., as well as individual numbers within that range, for example, 1, 2, 3, 4, 5, and 6. This applies regardless of the breadth of the range.

[0377] Whenever a numerical range is indicated herein, it is meant to include any cited numeral (fractional or integral) within the indicated range. The phrases “ranging/ranges between” a first indicate number and a second indicate number and “ranging/ranges from” a first indicate number “to” a second indicate number are used herein interchangeably and are meant to include the first and second indicated numbers and all the fractional and integral numerals therebetween.

[0378] As used herein the term “method” refers to manners, means, techniques and procedures for accomplishing a given task including, but not limited to, those manners, means, techniques and procedures either known to, or readily developed from known manners, means, techniques and procedures by practitioners of the chemical, pharmacological, biological, biochemical and medical arts.

[0379] As used herein, the term “treating” includes abrogating, substantially inhibiting, slowing or reversing the progression of a condition, substantially ameliorating clinical or aesthetical symptoms of a condition or substantially preventing the appearance of clinical or aesthetical symptoms of a condition.

[0380] When reference is made to particular sequence listings, such reference is to be understood to also encompass sequences that substantially correspond to its complementary sequence as including minor sequence variations, resulting from, e.g., sequencing errors, cloning errors, or other alterations resulting in base substitution, base deletion or base addition, provided that the frequency of such variations is less than 1 in 50 nucleotides, alternatively, less than 1 in 100 nucleotides, alternatively, less than 1 in 200 nucleotides, alternatively, less than 1 in 500 nucleotides, alternatively, less than 1 in 1000 nucleotides, alternatively, less than 1 in 5,000 nucleotides, alternatively, less than 1 in 10,000 nucleotides.

[0381] It is appreciated that certain features of the invention, which are, for clarity, described in the context of separate embodiments, may also be provided in combination in a single embodiment. Conversely, various features of the invention, which are, for brevity, described in the context of a single embodiment, may also be provided separately or in any suitable subcombination or as suitable in any other described embodiment of the invention. Certain features described in the context of various embodiments are not to be considered essential features of those embodiments, unless the embodiment is inoperative without those elements.

[0382] Various embodiments and aspects of the present invention as delineated hereinabove and as claimed in the claims section below find experimental support in the following examples.

### EXAMPLES

[0383] Reference is now made to the following examples, which together with the above descriptions illustrate some embodiments of the invention in a non limiting fashion.

[0384] Generally, the nomenclature used herein and the laboratory procedures utilized in the present invention include molecular, biochemical, microbiological and recombinant DNA techniques. Such techniques are thoroughly explained in the literature. See, for example, “Molecular Cloning: A laboratory Manual” Sambrook et al., (1989); “Current Protocols in Molecular Biology” Volumes I-III Ausubel, R. M., ed. (1994); Ausubel et al., “Current Protocols in Molecular Biology”, John Wiley and Sons, Baltimore, Md. (1989); Perbal, “A Practical Guide to Molecular Cloning”, John Wiley & Sons, New York (1988); Watson et al., “Recombinant DNA”, Scientific American Books, New York; Birren et al. (eds) “Genome Analysis: A Laboratory Manual Series”, Vols. 1-4, Cold Spring Harbor Laboratory Press, New York (1998); methodologies as set forth in U.S. Pat. Nos. 4,666,828; 4,683,202; 4,801,531; 5,192,659 and 5,272,057; “Cell Biology: A Laboratory Handbook”, Volumes I-III Cellis, J. E., ed. (1994); “Current Protocols in Immunology” Volumes I-III Coligan J. E., ed. (1994); Stites et al. (eds), “Basic and Clinical Immunology” (8th Edition), Appleton & Lange, Norwalk, Conn. (1994); Mishell and Shiigi (eds), “Selected Methods in Cellular Immunology”, W. H. Freeman and Co., New York (1980); available immunoassays are extensively described in the patent and scientific literature, see, for example, U.S. Pat. Nos. 3,791,932; 3,839,153; 3,850,752; 3,850,578; 3,853,987; 3,867,517; 3,879,262; 3,901,654; 3,935,074; 3,984,533; 3,996,345; 4,034,074; 4,098,876; 4,879,219; 5,011,771 and 5,281,521; “Oligonucleotide Synthesis” Gait, M. J., ed. (1984); “Nucleic Acid Hybridization” Hames, B. D., and Higgins S. J., eds. (1985); “Transcription and Translation” Hames, B. D., and Higgins S. J., Eds. (1984); “Animal Cell Culture” Freshney, R. I., ed. (1986); “Immobilized Cells and Enzymes” IRL Press, (1986); “A Practical Guide to Molecular Cloning” Perbal, B., (1984) and “Methods in Enzymology” Vol. 1-317, Academic Press; “PCR Protocols: A Guide To Methods And Applications”, Academic Press, San Diego, Calif. (1990); Marshak et al., “Strategies for Protein Purification and Characterization—A Laboratory Course Manual” CSHL Press (1996); all of which are incorporated by reference as if fully set forth herein. Other general references are provided throughout this document. The procedures therein are believed to be well known in the art and are provided for the convenience of the reader. All the information contained therein is incorporated herein by reference.

### General Materials and Experimental Methods

### Media, Cells, Antibodies, Tetramer and Peptides

[0385] Unless otherwise stated, all culture medium was RPMI 1640 supplemented with 10% heat inactivated fetal calf serum (FCS), 1% penicillin and streptomycin, and 1% L-glutamine. Cell lines used were: Jurkat 76 cell line; TAP-deficient-HLA-A2⁺ T2 cell line that can be efficiently loaded with exogenous peptides; 501A and Skmel5 melanoma cell lines; Loucy and BV-173 ALL cell line; DG75 lymphoma cell line; MDA-MB-231 human breast carcinoma; SW620 and colo-205 human colon cancer; Panc-1 human pancreatic carcinoma; A431 epidermoid carcinoma cell line.

[0386] The cell lines UMUC3 human bladder transitional cell carcinoma and Fibroblast, were cultured in DMEM (Dulbecco's Modified Eagle Medium) supplemented with 10% heat inactivated FCS, 1% penicillin and streptomycin, and 1% L-glutamine.

[0387] Caco-2 human colon cancer cell line was cultured in DMEM supplemented with 20% heat inactivated FCS, 1% penicillin and streptomycin, and 1% L-glutamine. PBMCs were obtained from volunteer donors from the National Blood Service, Colindalea, London, UK.

[0388] Flow cytometry antibodies (Abs) were: anti-human PE (Jackson Immunoresearch), CD3 PerCp, CD8 APC, CD8 APC-Cy7, IFN-γ-APC, IL-2 PE (Bactlab Diagnostic), and CD107a eFluor660. PE-labeled HLA-A2/WT_{Db126} tetramers were obtained from Beckman Coulter.

[0389] The peptides used for this study were: pWT1_{Db126} (RMFPNAPYL, SEQ ID NO:1), pWT1₂₃₅ (CMTWNQMNL, SEQ ID NO:7), gp100: G2-209-2M (IMDQVPFSV, SEQ ID NO:12) and gp100-280 (YLEPGPVTA, SEQ ID NO:13), HIV: Gag (SLYNYVATL, SEQ ID NO:14), and MDM2 (LLGDLFGV, SEQ ID NO:15).

[0390] Production of Biotinylated Single-Chain MHC-Peptide Complexes—

[0391] Single-chain MHC (scMHC)-peptide complexes were produced by in-vitro refolding of inclusion bodies produced in E. coli upon IPTG induction, as previously described (33). Briefly, a scMHC containing the β2-microglobulin and the extracellular domains of the HLA-A2 gene connected to each other by a flexible linker was engineered to include the BirA recognition sequence for site specific biotinylation at the carboxyl-terminus. In-vitro refolding was performed in the presence of peptides as described. Correctly folded MHC-peptide complexes were isolated and purified by anion exchange Q-sepharose chromatography (Pharmacia), followed by site-specific biotinylation using the BirA enzyme (Avidity).

[0392] Selection of Phage Abs on Biotinylated Complexes—

[0393] Selection of phage antibodies (Abs) on biotinylated complexes was performed as previously described (27). Briefly, a large human Fab library containing 3.7×10¹⁰ different Fab clones was used for the selection. Phages were first pre-incubated with streptavidin-coated paramagnetic beads (200 μl; Dynal) to deplete the streptavidin binders. The remaining phages were subsequently used for panning with decreasing amounts of biotinylated scMHC-peptide complexes. The streptavidin-depleted library was incubated in solution with soluble biotinylated scHLA-A2-WT1 complexes (500 nM for the first round, and 100 nM for the subsequent rounds) were added to the mixture and incubated for 30 minutes at room temperature. Streptavidin-coated magnetic beads (200 μl for the first round, and 100 μl for the subsequent rounds) were added to the mixture and incubated for 10-15 minutes at room temperature. The beads were washed extensively 12 times with PBS/0.1% Tween 20 with an additional 2 washes with PBS. Bound phages were eluted with triethylamine (100 mM, 5 minutes at room temperature), followed by neutralization with Tris-Hcl (1 M, pH 7.4), and used to infect E. coli TG1 cells (OD₆₀₀=0.5) for 30 minutes at 37° C.

[0394] Expression and Purification of Soluble Recombinant Fab Abs—

[0395] Fab Abs were expressed and purified, as previously described (27). E. coli BL21 cells were grown to OD₆₀₀=0.8-1.0 and induced to express the recombinant Fab Ab by the addition of IPTG for 3-4 hours at 30° C. Periplasmic content was released using the B-PER solution (Pierce), which was applied onto a pre-washed TALON column (Clontech). Bound Fabs were eluted using 0.5 ml of 100 mM imidazole in PBS. The eluted Fabs were dialyzed twice against PBS (overnight, 4° C.) to remove residual imidazole.

[0396] Surface Plasmon Resonance (SPR)—

[0397] Kinetic studies for affinity measurements of the F2 and F3 Fabs to HLA-A2/WT1_{Db126} complexes were performed on a ProteOn XPR36 Protein Interaction Array System (Bio-Rad Laboratories, Hercules) as described before (34).

[0398] Antigen Density Quantification—

[0399] The number of specific peptide-MHC complexes on the surface of tumor cell lines was determined as previously described (35). Briefly, specific binding of F3 Fab to HLA-A2/WT1_{Db126} complexes was detected using PE-labeled anti-k L chain mAb. To transform the florescent signal obtained by flow cytometer into the number of HLA-A2/WT1_{Db126} sites, the present inventors used the QuantiBRITE PE kit (BD Biosciences) according to manufacturer's instructions.

[0400] Generation of TCR-Like CAR Retroviral Constructs—

[0401] scFv DNA of the TCR like Fabs F2 and F3 were generated by connecting the carboxyl-terminus of the V_{L} region and the amino-terminus of the V_{H} region by a peptide linker. For the chimeric receptor construct, the F2 and F3 scFvs were connected via the carboxyl-terminus of the V_{H} region to a CD28− FcγRI γ chain construct (36). The TCR-like chimeric receptor DNA constructs were cloned into retroviral pBullet vector followed by IRES and the GFP gene (37).

[0402] Transduction of Retroviral TCR Constructs into Jurkat Cells and Primary T Cells—

[0403] A total of 2×10⁶ Phoenix amphotropic packaging cells were cultured in 10-cm culture plated for 24 hours at 37° C. with 5% CO₂. The cells were transfected with the vector constructs and pCL-ampho using calcium phosphate precipitation (Invitrogen Life Technologies). After culturing for 24 hours and replacement of medium, the viral supernatant was harvested. 24 hours before retroviral transduction, Jurkat cells were split and T cells were enriched using Ficoll and RosetteSep Human T cell enrichment kit followed by and activation for 48 hours using 24 wells non-treated plates coated with anti-CD3 Ab OKT3 at 1 μg/ml and anti-CD28 at 5 μg/ml with addition of and IL-2 (600 U/ml; Chiron). For retroviral transductions, retronectin-coated (Takara) 24-well plates were seeded with cells at 1×10⁶ per well in 1 ml, cultured for 30 minutes, and then transduced with 1 ml of the constructs viral supernatant. For PBMCs (T cells), the transductions were conducted in culture medium supplemented with IL-2 at 600 U/ml. After 24 hours at 37° C. with 5% CO₂, the culture medium for Jurkat cells was replaced; for PBMCs (T cells) the replaced medium was supplemented with IL-2 at 100 U/ml. After additional 48 hours culture period, flow cytometry analysis was performed by a LSR II flow cytometer (BD Biosciences).

[0404] Intracellular IFN-γ and IL-2 Detection Assays—

[0405] Transduced T cells and T2 cells loaded with WT1_{Db126} or WT1₂₃₅ were added at 2×10⁵/well in 200 μl of culture medium containing brefeldin A (Sigma-Aldrich) at 1 μg/ml. After 16 hours at 37° C. with 5% CO₂ staining of the cells for surface CD8 was performed, followed by fixation, permeabilization, and staining for intracellular IFN-γ and IL-2 (Fix & Perm kit; Caltag). Cells were then washed and analyzed by a LSR II flow cytometer (BD Biosciences).

[0406] IFN-γ Secretion Assays—

[0407] Transduced T cells were stimulated with irradiated T2 cells (at 1:1 ratio) loaded with the WT1₁₂₆ or Gp100-280 peptide. The assay was conducted in triplicates in 200 μl medium. After 18 hours of incubation at 37° C. with 5% CO₂, the supernatant was harvested and tested for secreted IFN-γ using a human ELISA kit (BD Biosciences).

[0408] Enrichment and Depletion of Specific Subpopulations—

[0409] T-cell subpopulation depletion was obtained by incubating the T cell population with anti-CD4 or anti-CD8, for 20 minutes. After wash with PBS 0.1% BSA, cells were mixed with anti-mouse

[0410] IgG-coated magnetic beads (Dynal, invitrogen) for additional 30 minutes followed by magnetic depletion for 5 minutes. The negative fraction was then washed three times with PBS 0.1% BSA and was incubated for 24 hours recovery in 37° C. Flow cytometry analysis of purified subpopulations revealed purify above 90%.

[0411] Cytotoxic Assays—

[0412] The EBV-transformed B cell line T2 was labeled with [³⁵S] methionine for 18 hours at 37° C. with 5% CO₂. The cells were washed 3 times and loaded with the various concentrations of WT1₁₂₆ or Gp100-280 peptide for 2 hours at 37° C. with 5% CO₂. After incubation, the cells were washed of excess peptide. For different E:T ratios, peptide-loaded [³⁵S]-labeled T2 cells were added to 2-fold dilutions of transduced T cells. For the peptide titration assays, transduced cells and peptide-loaded [³⁵S]-labeled T2 cells were co-cultured at a ratio of 5:1 (E:T). After an incubation period of 4 hours at 37° C. with 5% CO₂, 25 μl of supernatant were harvested, diluted with 200 μl of scintillation fluid, and counted using a β counter (BD Biosciences, San Jose, Calif.). The percentage of specific lysis was calculated as ([experimental [³⁵S]-release−spontaneous [³⁵S]-release]/[maximum [³⁵S]-release−spontaneous [³⁵S]-release])×100, with spontaneous release being the [³⁵S]-methionine released from target cells in the absence of effector cells and maximum release being the [³⁵S]-methionine released from target cells lysed with 0.05 M NaOH. The percentage of maximal lysis was determined as the highest cytotoxic activity of target cells. In the cytotoxic assays of the CD4, CD8 enriched T cells, the amount of cells were used was normalized in respective to the highest frequency of specific transduced cells determined by tetramer or Vβ Ab staining.

[0413] Degranulation Assay—

[0414] Transduced T cells were cocultured with T2 cells (at 1:1 ratio) loaded with the WT1₁₂₆ or Gp100-280 peptide in 200 μl medium. After 4 hours of incubation at 37° C. with 5% CO₂, the cells were stained with anti-CD8 PerCP and anti-CD107a Abs for 30 minutes. The cells were washed, resuspended in PBS 0.1% BSA and the expression of CD107a on CD8⁺ transduced T cell was determined by flow cytometry (FACSCalibur, Becton Dickinson).

### Example 1

### Isolation and Characterization of TCR-Like Antibodies with Specificity to HLA-A2-WT1_{Db126} Complexes Experimental Results

[0415] Recombinant TCR-like Fab antibodies recognizing HLA-A2-WT1_{Db126} complexes were isolated by screening a large naive phage Fab library as previously described (27, 28). For panning the present inventors used recombinant single-chain HLA-A2-WT1_{Db126} complexes expressed in E. coli as insoluble inclusion bodies. Subsequently, HLA-A2-WT1_{Db126} complexes were refolded and purified using established redox-shuffling strategies (28). The phage display screening was analyzed using differential binding to specific HLA-A2-WT1_{Db126} versus control complexes and identified specific clones. Of 96 phage clones tested, 13 exhibited specific binding to recombinant HLA-A2-WT1_{Db126} complexes, compared to control complexes displaying irrelevant peptides (FIG. 1A).

[0416] Based on specific recognition to HLA-A2-WT1_{Db126} complexes, two clones, F2 and F3, were selected for further characterization and tested for their ability to bind the HLA-A2-WT1_{Db126} complexes in their native form. To this end, the present inventors used the TAP-deficient HLA-A2 positive T2 cells which were loaded with the WT1_{Db126} RMFPNAPYL (SEQ ID NO:1) peptide or control peptides. As shown in FIG. 1B, flow cytometry assays using the anti-HLA-A2-WT1_{Db126}-specific soluble purified Fabs, F2 or F3, exhibited specific binding to WT1_{Db126}-loaded APCs but not to APCs loaded with control peptides. The binding affinity of the HLA-A2/WT1_{Db126}-specific Fab TCR-like antibodies was determined by SPR using soluble HLA-A2/WT1_{Db126} complexes on chip-immobilized Fabs coupled through an anti-human Fab, and revealed an apparent affinity of 400 nM and 30 nM for F2 and F3, respectively (FIG. 1C).

[0417] To determine whether the WT1-specific TCR-like antibodies recognize the authentic endogenously-derived HLA-A2-WT1_{Db126} complexes on the surface of target cells, the present inventors tested binding using a large panel of tumor cell lines. As shown in FIG. 2, the F2 Fab recognized HLA-A2-WT1_{Db126} positive cells. No reactivity was observed with WT1-negative fibroblasts cells or HLA-A2-negative A431 cells. Similar data was observed with the F3 Fab (data not shown). The endogenous expression of WT1 transcript in these tumor cell lines was determined by mRNA analysis. The present inventors have further quantified the number of HLA-A2-WT1_{Db126} complexes expressed on the surface of tumor cell lines using the F3 Fab and the total number of HLA-A2 molecules expressed on the cell surface using the anti-HLA-A2 antibody BB7.2. Overall, these data indicate that Fabs F2 and F3 exhibit properties of TCR-like antibodies, they bind with HLA-A2 restriction and WT1_{Db126} peptide specificity to peptide-loaded APCs as well as to tumor target cells that present the antigen in an HLA-restricted manner and with high affinity (30 nM and 400 nM, respectively) compared to native TCRs.

### Example 2

### Expression of TCR Like ABs as Chimeric Antigen Receptors (CARs)

[0418] Previous CAR studies revealed that employing single chain CARs is an efficient strategy to redirect T cells using Ab fragments, as it requires only a single retroviral transduction step (38). Therefore, the present inventors generated scFv forms of the F2 and F3 TCR-like Fab Abs by fusing the carboxyl-terminus of the VL domain to the amino-terminus of the VH domain using a flexible (Gly4Ser)3 peptide linker (SEQ ID NO:2). The complete CAR molecule was composed of the F2 or F3 scFv connected via the carboxyl-terminus of the VH domain to a CD28-γ chain construct. FIGS. 9A-B and 10A-B provide the sequences of the F2 and F3 CARs, respectively. This CAR construct was introduced into a retroviral vector (pBULLET) which also harbors a GFP reporter gene to visualize cells transduced with the vector (37). FIG. 3 represents an analysis of TCR-negative Jurkat-76 cells transduced with the CAR retroviral vectors encoding the F2 or the F3 chimeric receptors. The present inventors examined the staining of GFP-positive transduced cells with WT1 and control tetramers and found that GFP-positive cells representing transduced cells were co-stained with high frequency of >20% with HLA-A2-WT1_{Db126}-specific tetramers but not with tetramers displaying irrelevant peptides. Data are shown for the F2 CAR and similar results were obtained for F3.

[0419] Next, the present inventors tested the transduction efficiency in human primary T cells. F2 (400 nM) and F3 (30 nM) TCR like CARs were retro-virally transduced into HLA-A2 positive human T cells. FIG. 4A shows that CD8⁺ human T cells were efficiently transduced to express significant levels of the F2 TCR-like CAR as evident by staining of transduced cells with HLA-A2-WT1_{Db126} tetramers. Human CD8⁺ T cells transduced with the F3 TCR-like CAR expressed high level of CAR as revealed by tetramer staining; however, the viability of the transduced cells was very low. As shown in FIG. 4A, the remaining fraction of viable CD8+ transduced T cells expressed the receptor at high levels (>60%) as determined by tetramer staining. Retroviral transduction of the 30 nM TCR-like F3 CAR into HLA-A2 negative cells yielded cell surface expression comparable to that observed for F2 (FIG. 4B), but with much higher viability rate (most transduced cells were viable). These results suggest that the elevated affinity of the 30 nM TCR-like CAR, F3, in combination with the high avidity of the receptor present on the T cell surface, may lead to some loss of specificity and consequently to decreased cell survival. The F2 TCR-like CAR, having moderate affinity of 400 nM, exhibited expression properties and characteristics that are more suitable for the comparison between T cells redirected by either CAR based on TCR-like Ab fragments or by a cloned αβTCR.

### Example 3

### Efficiency of Transduction of T Cells Redirected by Either ABTCR or TCR-Like Antibody-Based CAR

[0420] To compare the specificity and function of T cells retargeting by either αβTCRs or TCR-like antibody-based CARs, the present inventors used an αβTCR specific to the HLA-A2-WT1_{Db126} epitope which has been previously isolated and characterized by Prof. Stauss's group (the University College of London) and was inserted into the retroviral vector MP71 (7). The present inventors studied the transduction efficiency of the WT1_{Db126} αβTCR (also referred to as “αβTCR”) versus that of the F2 TCR like CAR, using retroviral transductions into primary human T cells. FIG. 5 demonstrates efficient transductions of HLA-A2+ T cells transduced with either the αβTCR construct (as determined by V132.1 or HLA-A2-WT1_{Db126} tetramer staining) or the F2 TCR like CAR construct (as determined by HLA-A2-WT1_{Db126} tetramer staining). The αβTCR construct has the addition of an internal disulphide bond to minimize the mispairing of the exogenous TCR α and β chains with the endogenous TCR chains (39). However, HLA-A2-WT1_{Db126} tetramer staining of the αβTCR transduced T cells pointed to low levels of expression. This observation may have been due to either a low expression of functional αβTCR which will not facilitate tetramer binding or due to TCR mispairing.

### Example 4

### Activation of αβTCR or TCR-Like Ab CAR-Transduced T Cells

[0421] As a first step for functional evaluation and comparison of T cells transduced with αβTCR or TCR-like Ab CAR the present inventors tested their ability to undergo proper activation. αβTCR or F2-TCR-like Ab CAR-transduced T cells were stimulated with the human TAP-deficient T2 cells loaded with either the specific peptide (WT1_{Db126}) or an irrelevant peptide (WT1₂₃₅) as a control. Following overnight stimulation, the cells were stained for CD8 and for intracellular IFN-γ and IL-2. As shown in FIG. 6A, CAR-transduced T cells and αβTCR transduced T cells were activated in an antigen-specific manner as indicated by the comparable number of transduced T cells that were intracellularly stained with anti-IL-2 and/or IFN-γ.

[0422] In order to test the avidity (also referred to as “functional avidity”) of the transduced T cells, the present inventors examined the dose dependency and peptide specificity of IFN-γ secretion by transduced T cells in an ELISA assay. As shown in FIG. 6B, T cells transduced with the WT1 αβTCR construct were more sensitive to lower peptide concentrations as compared to T cells transduced with the F2 TCR-like Ab CAR. T cells expressing the WT1 αβTCR secreted higher levels of IFN-γ in response to T2 cells loaded with peptide concentration ranging from 0.3 to 100 μM, whereas T cells expressing the F2 TCR-like CAR secreted considerably reduced levels of IFN-γ at peptide concentrations starting as low as 0.30 μM. At 1 μM T cell transduced with native TCR (i.e., the WT1 αβTCR construct) secreted significant levels of IFN-γ while the TCRL-transduced T cells did not secret at all. Notably, at 10 μM, the WT1 αβTCR-transduced T cells exerted high and close to maximal IFN-γ secretion, whereas the TCR-like Ab CAR-transduced T cells showed ˜50% less secretion. From these results it can be determined that the avidity of the T cells transduced with the CAR of WT1 αβTCR is between 3-10 μM, e.g., about 5 μM, and the avidity of the T cells transduced with the CAR of F2 TCRL is about 10 μM.

[0423] In addition to measuring IFN-γ secretion the present inventors assessed the expression of CD107a, a marker of CD8+ T-cell degranulation following stimulation, on the surface of the transduced T cells (FIG. 6C). Confirming the cytokine secretion assays, the present inventors observed significant differences in the expression level of CD107a as a function of WT1_{Db126} peptide concentration. The F2 TCR-like Ab transduced-T cells expressed significant lower levels of CD107a compared with the TCR-transduced T cells which indicates a much lower degranulation and stimulation levels. At low peptide doses, of 1 and 3 μM, major 3-10-fold difference in CD107a expression was observed (FIG. 6C). These results indicate major differences in antigen sensitivity of the αβTCR versus TCR-like Ab CARs and consequently in T cell stimulation and cytokine secretion.

### Example 5

### Cytolytic Activity of T Cells Transduced with TCR-Like Ab Versus of TCR CARs

[0424] Next, the present inventors compared the F2 TCR-like Ab CAR to the engineered αβTCR for their cytolytic activity towards ³⁵S-methionine-labelled T2 cells loaded with either a relevant (WT1_{Db126}) or irrelevant control peptide. As shown in FIG. 7A, T cells transduced with the αβTCR showed greater specific cytolytic activity than T cells transduced with the F2 TCR-like Ab CAR. Both transduced T cells maintained their specificity towards the WT1 peptide as their background cytotoxic activity towards a control non-specific peptide was similar and low (FIG. 7A). The transduced T cells exhibited also low accepted background cytotoxicity to T2 APCs without any loaded peptide (FIG. 7B).

[0425] In order to examine the antigen sensitivity of both receptors, the present inventors performed a killing assay using ³⁵S-methionine-labeled T2 cells loaded with decreasing concentrations of the WT1_{Db126} specific peptide.

As shown in FIG. 7B, the sensitivity of the αβTCR-transduced T cells was indeed greater compared with the TCR-like Ab-transduced cells as the αβTCR cells were more efficient in mediating killing of WT1_{Db126} loaded T2 cells at low peptide concentrations. As observed before, this was most significant at the lower peptide doses of 1-3 μM, with 4-20-fold difference.

[0426] The present inventors also tested the killing sensitivity of the two types of transduced T cells on tumor cells that express the native HLA-A2/WT1_{Db126} complex. For this purpose the present inventors used HLA-A2+ WT1 ³⁵S-methionine-labeled antigen positive 501A and MDA231 cells and HLA-A2−/WT1+ A431 cells as control. As shown in FIG. 7C, a marked and significant difference was observed in the killing sensitivity of the αβTCR transduced T cells as compared to the TCR-like Ab CAR T cells at various effector to target (E:T) ratios. While the αβTCR transduced T cells exhibited E:T-dependent killing of 501A and MDA231 tumor target cells, the TCR-like Ab-transduced cells showed only very marginal minor killing activity on these cells (FIG. 7C). These results correspond to the aforementioned observation that T cells transduced with the αβTCR exhibited higher antigen sensitivity compared to the TCR-like Ab transduced cells, and consequently results in more efficient cytolytic activity toward tumor cells.

[0427] Next, the present inventors attempted to further investigate the differences between CAR and TCR-transduced T cells concerning the relative contribution of the CD8 and CD4 subpopulations to overall T cell-mediated cytotoxic activity. Thus, the present inventors transduced primary T cells with the F2 TCRL CAR or the αβTCR CAR constructs and derived the CD4+ and CD8+ T-cell subpopulations by depletion with anti-CD8 or anti-CD4, respectively. Flow cytometry analysis of purified subpopulations revealed purify of above 95% (data not shown). Using the isolated purified CD4+ and CD8+ subpopulations the present inventors tested their sensitivity and function in killing assays in which peptide-pulsed ³⁵S-methionine-labeled T2 cells were used as targets (FIG. 8). The results show that the difference in sensitivity and function of αβTCR CAR vs. F2 TCRL CAR-transduced T cells was maintained also for the purified subpopulation of CD8+ T cells when peptide sensitivity (FIG. 8A) and E:T ratio (FIG. 8B) were tested. TCR-transduced CD8+ T cells were more active compared to CAR-transuded cells similarly with what was observed with the intact whole T cell population. The present inventors also observed that most killing activity was mediated by CD8+ T cells (comparing data in FIGS. 8A and B to FIGS. 8C and D) and CD4+ cells exhibited minor killing activity of up to 30% killing compared to very efficient killing (up to 100% of relative maximal killing) with CD8+ T cells. Interestingly, purified CD4+ cells of F2 TCRL CAR-transduced T cells was somewhat more efficient compared with the αβTCR CAR transduced cells in most of the peptide doses tested (FIG. 8C) and at high E:T ratios (FIG. 8D). These results demonstrate that the F2 TCRL CAR construct confers the T cell a TCR-like specificity which is not CD8-dependent.

[0428] Overall, the data with total un-separated T cells transduced with αβTCR CAR or the F2 TCRL CAR as well as the CD8+ and CD4+ subpopulations further support the findings that an upper affinity threshold for TCR-based recognition is required to mediate effective and optimal functional activity in killing of target cells. When these principals are applied to the functional outcomes of engineered T cells, the rational design of TCRs and TCR-based constructs may need to be optimized to a given affinity threshold in order to achieve optimal T cell function.

[0429] Analysis and Discussion

[0430] Engineered T cells constitute a powerful tool to redirect T cells to a desired target for immunotherapy and are being tested in clinical trials (1, 3, 5, 7, 9, 10, 15, 18, 40, 41). Recent advances in TCR/antibody engineering led to 2 promising approaches in adoptive cell transfer for cancer therapy. One is the ability to modify TCR sequences to increase their affinity for cognate tumor antigen epitopes (42-44). For example, various strategies such as phage-display of TCR libraries have led to the generation of TCR variants with supra-physiological binding affinity [up to pico molar (pM)] towards epitopes derived from NY-ESO-1 or HTLV-1 (43). The second major advance was the ability to generate high affinity TCR-like antibodies that bind the HLA-peptide complex with high affinity and specificity in the low nM affinity range (27-30). However, in contrast to native TCRs that require further affinity engineering and sequence manipulation, these are native antibodies made by variable domain recombination using antibody phage display libraries or native antibody germ-line sequences made by hybridoma approaches from immunized mice.

[0431] This study has aimed to directly compare, for the first time, engineered T cells that carry 2 forms of HLA-peptide complex-based recognition moieties: a naturally cloned αβTCR versus a corresponding recombinant TCR-like antibody-based CAR, both recognizing the same antigenic epitope derived from TAA WT1. The ability of engineered T cells based on the cloned αβTCR strategy to recognize and specifically kill tumor cells expressing the desired target has been previously demonstrated (6-11). Here, the present inventors investigated the transduction efficiency of the 2 constructs into primary human T cells and compared the biological functions of the transduced cells.

[0432] To generate a chimeric antigen receptor based on TCR-like Ab fragments, 2 TCR-like Fab antibodies were isolated that target the HLA-A2-WT1_{Db126} complex with affinities of 400 nM and 30 nM. These TCR-like Fabs exhibited high specificity by their ability to discriminate between HLA-A2 complexes displaying the specific WT1_{Db126} peptide and HLA-A2 displaying irrelevant control peptides. Furthermore, the WT1-specific TCR-like antibodies recognized tumor cells that displayed the naturally processed and presented WT1 epitope in the context of HLA-A2. Recognition was peptide- and HLA-specific which merits further evaluation of these TCR-like antibodies for antibody-based tumor targeting using antibody arming strategies such as antibody-drug conjugates (ADC) (45) or T-cell engagement approaches through the use of antibody bi-specific constructs with anti-CD3 or anti-CD16 (46).

[0433] Using these TCR like Fabs in the context of CARs, as designed by Eshhar et al (38), revealed that retroviral transduction of the high affinity F3 TCR-like Ab (30 nM) into HLA-A2 positive cells induced massive cell death of transduced cells, with a small fraction of viable cells expressing the receptor. Without being limited by any theory, the present inventors hypothesize that this CAR lost its specificity and mediated non-specific killing of neighbor lymphocytes by recognizing HLA-A2 complexes regardless of their presented peptides. It is likely that the avidity of the chimeric receptors is increased because they are expressed on the cell surface at relatively high levels and that this high avidity, combined with the high affinity of this receptor, affects the receptor ability to maintain its specificity, leading to a leakage in its discrimination ability (i.e., cross reactivity with HLA-A2 complexes presenting irrelevant peptides). This notion is supported by transduction experiments in HLA-A2 negative T cells in which most of the cells were viable and a fraction expressed the CAR. In this case, due to absence of HLA-A2 complexes on the surface of the cells, no cytotoxic activity was observed by transduced T cells which expressed the 30 nM F3 TCR-like CAR. Additional supporting evidence includes the previous finding by the present inventors which demonstrated that HLA-A2-specific TCR-like antibodies may cross-react with HLA-A2 molecules presenting other HLA-A2-restricted peptides but not with other HLA alleles (unpublished data). Studies with affinity-matured native TCRs demonstrated that although some of the identified affinity enhanced variants showed superior T-cell function, the increase in affinity oftentimes led to loss of target cell specificity (44, 47).

[0434] The data presented herein are supported by a recent study assessing the relationship of TCR affinity, TCR-peptide-MHC binding parameters and T cell function. This study tested a panel of sequence-optimized HLA-A2/NY-ESO-1 specific TCR variants with affinities lying within physiological boundaries to preserve antigenic specificity and avoid cross-reactivity, as well as 2 variants with a very high and a low-affinity. Primary human CD8 T cells transduced with these TCRs demonstrated robust correlations between binding measurements of TCR affinity and avidity and the biological response of the T cells, such as TCR cell-surface clustering, intracellular signaling, proliferation, and target cell lysis (49). Strikingly, and as observed by the present inventors herein, above a threshold of TCR-peptide-MHC affinity (K_{D}<□5 μM), T cell function could not be further enhanced, revealing a plateau of maximal T cell function, compatible with the notion that multiple TCRs with slightly different affinities participate equally (co-dominantly) in immune responses. Similar to the present study, TCRs displaying affinity above the defined threshold exhibited non-specific recognition by the T cell receptor. The observation with the TCR-like antibody-based CAR is consistent with this study and indicates a functional threshold for optimal affinity of engineered TCR or antibody-based CARs. The work performed on the NY-ESO-1 αβTCR CARs defined the upper affinity limit of TCR for specific antigen recognition as approximately 280-450 nM (44, 49).

[0435] The affinity of the F2 TCR-like CAR as soluble monovalent antibody fragment was found to be 400 nM, at the uppermost border of this limit. The data presented herein for the WT1 TCR-like antibody-based CAR demonstrate that specificity for the WT1 peptide epitope was maintained. However, in other studies that examined high affinity TCR-based CARs alterations in peptide specificity were observed (49). Thus, the possibility that high affinity TCR or TCR-like antibody based CARs may still bind to other self-peptide complexes at lower affinity and densities compared to the specific peptide cannot be excluded. Each CAR specificity should be examined carefully as these properties are crucial for clinical applications.

[0436] Based on the transduction data of the F3 (30 nM) and F2 (400 nM) TCR-like CARs, the present inventors have further compared the F2 TCR-like antibody CAR with the cloned αβTCR receptors. Each one of the receptors was introduced into human primary T cells by retroviral transduction. The expression of functional αβTCR or TCR-like CAR on the transduced cells was measured by specific WT1 tetramer binding and revealed that expression of functional TCR-like CAR was higher compared to the TCR (38% vs. 12%). Despite the difference these data were reproducible and consistent enabling the comparison of their ability to properly activate and mediate the biological functions of the transduced T cells. The present inventors found that both constructs were capable of properly activating the engineered T cells as indicated by intracellular cytokine expression; however, cytokine secretion assays revealed that the αβTCR construct was more sensitive to peptide target concentrations. These results were surprising as the 400 nM F2 TCR-like CAR exhibited higher affinity than the native TCR, which appears to have an affinity of 1 μM. The higher affinity receptor was expected to bind to lower concentrations of antigen than the native TCR (i.e., higher levels of cytokine secretion at lower target peptide concentrations). Moreover, as indicated above, tetramer staining revealed that the TCR-like CAR was expressed better on the cell surface compared to the αβTCR which further strengthen this observation. Without being bound by any theory, these results may be explained by impaired T cell activation caused by the high affinity TCR-like antibody CAR with agreement with the serial triggering model. This model suggests that for efficient T-cell activation, multiple TCRs on the cell surface should sample the MHC-peptide complex, a process depending on adequately short dissociation rates of the receptor-ligand interaction (32). Therefore, the high affinity of the TCR-like-CAR may have reduced the dissociation rates leading to antigen sensitivity reduction. Similarly, a recently published study using affinity-matured TCRs demonstrated that TCRs displaying affinity above the physiological range may exhibit reduced sensitivity to their corresponding ligand (48).

[0437] The cytotoxic activity of the transduced engineered cells whether tested as intact un-separated population of cells or after separation to CD8+ and CD4+ subpopulations, supported the aforementioned data. The TCR-like antibody-based CAR transduced cells exhibited a reduced cytotoxic activity compared to the αβTCR transduced cells, which exhibited significant and specific cytotoxic activity. Both transduced T cells expressing the αβTCR or the F2 TCRL CAR exhibited specific killing of target cells expressing the specific WT1 epitope, and did not recognize cells presenting an irrelevant epitope of WT1 nor antigen negative tumor cells. Finally, CD8 is not likely to play the same role in the CAR transduced T cells as it does with the conventional TCR/CD3 complex. This also can explain why the higher affinity CAR did not operate with the sensitivity of the TCR.

[0438] Without being bound by any theory, one conclusion from this work is that high affinity TCR-like antibodies are not suitable for optimal construction of CARs designed to retarget T cells. Another important aspect of this work is the relationships between affinity and avidity when comparing T cell and antibody-based immunotherapeutic approaches. The affinity of an antibody or TCR is defined as the binding strength of a single molecule to a cognate antigen. Distinguishably, TCR binding avidity is defined as the binding strength of multiple cell surface TCRs to their respective antigen while the avidity of soluble recombinant antibodies may be monovalent or bivalent. Hence, when using a TCR-like antibody as a CAR, the natural avidity of the soluble antibody is out of context from its natural properties. Therefore, all the potential effects arising from the cellular context including cell surface receptor density, MHC co-receptors, and T-cell activation state, should also be considered when constructing high affinity TCR-like antibody-based CARs (32). The overall sensitivity of T cells to antigen density is termed ‘functional avidity’ and includes the relative affinity of the TCR-MHC-peptide interaction and the subsequent efficiency of the downstream signal transduction. Since functional avidity refers to the actual sensitivity of the cellular response to MHC-peptide antigen density, all aspects of a TCR binding to peptide-MHC (pMHC) i.e., kinetic constants, avidity and relative affinity, have direct implications for efficient T cell function. Studies have demonstrated that CTLs that exhibit high functional avidities and hence, higher sensitivity, are more effective and therefore essential for antitumor response (50). Herein, the present inventors showed that the high affinity TCR-like antibody in a monovalent or bivalent context (data with IgG not shown) maintained high specificity. However, when the avidity of this TCR-like antibody was increased to a high level, as expressed on the surface of the engineered T cells as a CAR, it had significant consequences on T cell functions. The present inventors have isolated two Fabs with high and moderate affinity towards the WT1 epitope. Perhaps the isolated Fabs bind preferentially to WT1, but still cross-react with lower affinity for other self-peptides. Other Fabs against other targets may be better in this regard and such studies should be expended to have a more complete picture on the relationships between affinity, avidity, and specificity.

[0439] In summary, this study strongly supports the notion that optimal TCRs or TCR-based constructs possess a threshold affinity beyond which no improvement in T cell functions is achieved. When TCR-based constructs or TCR-like antibody affinity is enhanced to high and supra-physiological affinities, engineered T cells carrying such CARs react with many different pMHC complexes and may change T cell functional properties leading to unresponsiveness or in some cases loss of antigen specificity, leading to dangerous cross-reactivity. Therefore, rational design of improved TCRs to generate optimal CARs may need to be optimized up to a given affinity threshold in order to achieve optimal T cell function without risking T cells to undergo unresponsiveness or cross reactivity. In this context, high affinity CARs which can be composed of TCRL antibody variable fragments, or affinity enhanced αβTCRs are less suitable and attractive than native αβTCR or TCRL antibodies with moderate affinity (e.g., having a K_{D} higher than 150 nM) for the design of CARs.

[0440] Although the invention has been described in conjunction with specific embodiments thereof, it is evident that many alternatives, modifications and variations will be apparent to those skilled in the art. Accordingly, it is intended to embrace all such alternatives, modifications and variations that fall within the spirit and broad scope of the appended claims.

[0441] All publications, patents and patent applications mentioned in this specification are herein incorporated in their entirety by reference into the specification, to the same extent as if each individual publication, patent or patent application was specifically and individually indicated to be incorporated herein by reference. In addition, citation or identification of any reference in this application shall not be construed as an admission that such reference is available as prior art to the present invention. To the extent that section headings are used, they should not be construed as necessarily limiting.

### REFERENCES

### Additional References are Cited in Text

[0442] 1. Rosenberg, S. A., N. P. Restifo, J. C. Yang, R. A. Morgan, and M. E. Dudley. 2008. Adoptive cell transfer: a clinical path to effective cancer immunotherapy. Nat Rev Cancer 8: 299-308.
[0443] 2. Dudley, M. E., J. R. Wunderlich, P. F. Robbins, J. C. Yang, P. Hwu, D. J. Schwartzentruber, S. L. Topalian, R. Sherry, N. P. Restifo, A. M. Hubicki, M. R. Robinson, M. Raffeld, P. Duray, C. A. Seipp, L. Rogers-Freezer, K. E. Morton, S. A. Mavroukakis, D. E. White, and S. A. Rosenberg. 2002. Cancer regression and autoimmunity in patients after clonal repopulation with antitumor lymphocytes. Science 298: 850-854.
[0444] 3. Besser, M. J., R. Shapira-Frommer, A. J. Treves, D. Zippel, O. Itzhaki, L. Hershkovitz, D. Levy, A. Kubi, E. Hovav, N. Chermoshniuk, B. Shalmon, I. Hardan, R. Catane, G. Markel, S. Apter, A. Ben-Nun, I. Kuchuk, A. Shimoni, A. Nagler, and J. Schachter. 2010. Clinical responses in a phase II study using adoptive transfer of short-term cultured tumor infiltration lymphocytes in metastatic melanoma patients. Clin Cancer Res 16: 2646-2655.
[0445] 4. Rosenberg, S. A., J. C. Yang, R. M. Sherry, U. S. Kammula, M. S. Hughes, G. Q. Phan, D. E. Citrin, N. P. Restifo, P. F. Robbins, J. R. Wunderlich, K. E. Morton, C. M. Laurencot, S. M. Steinberg, D. E. White, and M. E. Dudley. 2011. Durable complete responses in heavily pretreated patients with metastatic melanoma using T-cell transfer immunotherapy. Clin Cancer Res 17: 4550-4557.
[0446] 5. Restifo, N. P., M. E. Dudley, and S. A. Rosenberg. 2012. Adoptive immunotherapy for cancer: harnessing the T cell response. Nat Rev Immunol 12: 269-281.
[0447] 6. Cohen, C. J., Z. Zheng, R. Bray, Y. Zhao, L. A. Sherman, S. A. Rosenberg, and R. A. Morgan. 2005. Recognition of fresh human tumor by human peripheral blood lymphocytes transduced with a bicistronic retroviral vector encoding a murine anti-p53 TCR. J immunol 175: 5799-5808.
[0448] 7. Xue, S. A., L. Gao, D. Hart, R. Gillmore, W. Qasim, A. Thrasher, J. Apperley, B. Engels, W. Uckert, E. Morris, and H. Stauss. 2005. Elimination of human leukemia cells in NOD/SCID mice by WT1-TCR gene-transduced human T cells. Blood 106: 3062-3067.
[0449] 8. Stanislawski, T., R. H. Voss, C. Lotz, E. Sadovnikova, R. A. Willemsen, J. Kuball, T. Ruppert, R. L. Bolhuis, C. J. Melief, C. Huber, H. J. Stauss, and M. Theobald. 2001. Circumventing tolerance to a human MDM2-derived tumor antigen by TCR gene transfer. Nat immunol 2: 962-970.
[0450] 9. Morgan, R. A., M. E. Dudley, J. R. Wunderlich, M. S. Hughes, J. C. Yang, R. M. Sherry, R. E. Royal, S. L. Topalian, U. S. Kammula, N. P. Restifo, Z. Zheng, A. Nahvi, C. R. de Vries, L. J. Rogers-Freezer, S. A. Mavroukakis, and S. A. Rosenberg. 2006. Cancer regression in patients after transfer of genetically engineered lymphocytes. Science 314: 126-129.
[0451] 10. Johnson, L. A., R. A. Morgan, M. E. Dudley, L. Cassard, J. C. Yang, M. S. Hughes, U. S. Kammula, R. E. Royal, R. M. Sherry, J. R. Wunderlich, C. C. Lee, N. P. Restifo, S. L. Schwarz, A. P. Cogdill, R. J. Bishop, H. Kim, C. C. Brewer, S. F. Rudy, C. VanWaes, J. L. Davis, A. Mathur, R. T. Ripley, D. A. Nathan, C. M. Laurencot, and S. A. Rosenberg. 2009. Gene therapy with human and mouse T-cell receptors mediates cancer regression and targets normal tissues expressing cognate antigen. Blood 114: 535-546.
[0452] 11. Robbins, P. F., R. A. Morgan, S. A. Feldman, J. C. Yang, R. M. Sherry, M. E. Dudley, J. R. Wunderlich, A. V. Nahvi, L. J. Helman, C. L. Mackall, U. S. Kammula, M. S. Hughes, N. P. Restifo, M. Raffeld, C. C. Lee, C. L. Levy, Y. F. Li, M. El-Gamil, S. L. Schwarz, C. Laurencot, and S. A. Rosenberg. 2011. Tumor regression in patients with metastatic synovial cell sarcoma and melanoma using genetically engineered lymphocytes reactive with NY-ESO-1. J Clin Oncol 29: 917-924.
[0453] 12. Uttenthal, B. J., I. Chua, E. C. Morris, and H. J. Stauss. 2012. Challenges in T cell receptor gene therapy. J Gene Med 14: 386-399.
[0454] 13. Gross, G., T. Waks, and Z. Eshhar. 1989. Expression of immunoglobulin-T-cell receptor chimeric molecules as functional receptors with antibody-type specificity. Proc Natl Acad Sci USA 86: 10024-10028.
[0455] 14. Eshhar, Z. 2008. The T-body approach: redirecting T cells with antibody specificity. Exp Pharmacol: 329-342.
[0456] 15. Kershaw, M. H., J. A. Westwood, L. L. Parker, G. Wang, Z. Eshhar, S. A. Mavroukakis, D. E. White, J. R. Wunderlich, S. Canevari, L. Rogers-Freezer, C. C. Chen, J. C. Yang, S. A. Rosenberg, and P. Hwu. 2006. A phase I study on adoptive immunotherapy using gene-modified T cells for ovarian cancer. Clin Cancer Res 12: 6106-6115.
[0457] 16. Pule, M. A., B. Savoldo, G. D. Myers, C. Rossig, H. V. Russell, G. Dotti, M. H. Huls, E. Liu, A. P. Gee, Z. Mei, E. Yvon, H. L. Weiss, H. Liu, C. M. Rooney, H. E. Heslop, and M. K. Brenner. 2008. Virus-specific T cells engineered to coexpress tumor-specific receptors: persistence and antitumor activity in individuals with neuroblastoma. Nat Med 14: 1264-1270.
[0458] 17. Kochenderfer, J. N., W. H. Wilson, J. E. Janik, M. E. Dudley, M. Stetler-Stevenson, S. A. Feldman, I. Maric, M. Raffeld, D. A. Nathan, B. J. Lanier, R. A. Morgan, and S. A. Rosenberg. 2010. Eradication of B-lineage cells and regression of lymphoma in a patient treated with autologous T cells genetically engineered to recognize CD19. Blood 116: 4099-4102.
[0459] 18. Porter, D. L., B. L. Levine, M. Kalos, A. Bagg, and C. H. June. 2011. Chimeric antigen receptor-modified T cells in chronic lymphoid leukemia. N Engl J Med 365: 725-733.
[0460] 19. Jena, B., G. Dotti, and L. J. Cooper. 2010. Redirecting T-cell specificity by introducing a tumor-specific chimeric antigen receptor. Blood 116: 1035-1044.
[0461] 20. Cheever, M. A., J. P. Allison, A. S. Ferris, O. J. Finn, B. M. Hastings, T. T. Hecht, I. Mellman, S. A. Prindiville, J. L. Viner, L. M. Weiner, and L. M. Matrisian. 2009. The prioritization of cancer antigens: a national cancer institute pilot project for the acceleration of translational research. Clin Cancer Res 15: 5323-5337.
[0462] 21. Inoue, K., H. Ogawa, Y. Sonoda, T. Kimura, H. Sakabe, Y. Oka, S. Miyake, H. Tamaki, Y. Oji, T. Yamagami, T. Tatekawa, T. Soma, T. Kishimoto, and H. Sugiyama. 1997. Aberrant overexpression of the Wilms tumor gene (WT1) in human leukemia. Blood 89: 1405-1412.
[0463] 22. Oji, Y., H. Ogawa, H. Tamaki, Y. Oka, A. Tsuboi, E. H. Kim, T. Soma, T. Tatekawa, M. Kawakami, M. Asada, T. Kishimoto, and H. Sugiyama. 1999. Expression of the Wilms' tumor gene WT1 in solid tumors and its involvement in tumor cell growth. Jap J Cancer Res: Gann 90: 194-204.
[0464] 23. Yamagami, T., H. Sugiyama, K. Inoue, H. Ogawa, T. Tatekawa, M. Hirata, T. Kudoh, T. Akiyama, A. Murakami, and T. Maekawa. 1996. Growth inhibition of human leukemic cells by WT1 (Wilms tumor gene) antisense oligodeoxynucleotides: implications for the involvement of WT1 in leukemogenesis. Blood 87: 2878-2884.
[0465] 24. Oka, Y., O. A. Elisseeva, A. Tsuboi, H. Ogawa, H. Tamaki, H. Li, Y. Oji, E. H. Kim, T. Soma, M. Asada, K. Ueda, E. Maruya, H. Saji, T. Kishimoto, K. Udaka, and H. Sugiyama. 2000. Human cytotoxic T-lymphocyte responses specific for peptides of the wild-type Wilms' tumor gene (WT1) product. Immunogenetics 51: 99-107.
[0466] 25. Gao, L., I. Bellantuono, A. Elsasser, S. B. Marley, M. Y. Gordon, J. M. Goldman, and H. J. Stauss. 2000. Selective elimination of leukemic CD34(+) progenitor cells by cytotoxic T lymphocytes specific for WT1. Blood 95: 2198-2203.
[0467] 26. Dahan, R., and Y. Reiter. 2012. T-cell-receptor-like antibodies—generation, function and applications. Expert Rev Mol Med 14: e6.
[0468] 27. Cohen, C. J., G. Denkberg, A. Lev, M. Epel, and Y. Reiter. 2003. Recombinant antibodies with MHC-restricted, peptide-specific, T-cell receptor-like specificity: new tools to study antigen presentation and TCR-peptide-MHC interactions. J Mol Recognit 16: 324-332.
[0469] 28. Denkberg, G., C. J. Cohen, A. Lev, P. Chames, H. R. Hoogenboom, and Y. Reiter. 2002. Direct visualization of distinct T cell epitopes derived from a melanoma tumor-associated antigen by using human recombinant antibodies with MHC-restricted T cell receptor-like specificity. Proc Natl Acad Sci USA 99: 9421-9426.
[0470] 29. Griffiths, A. D., S. C. Williams, O. Hartley, I. M. Tomlinson, P. Waterhouse, W. L. Crosby, R. E. Kontermann, P. T. Jones, N. M. Low, T. J. Allison, and et al. 1994. Isolation of high affinity human antibodies directly from large synthetic repertoires. EMBO J 13: 3245-3260.
[0471] 30. Sergeeva, A., G. Alatrash, H. He, K. Ruisaard, S. Lu, J. Wygant, B. W. McIntyre, Q. Ma, D. Li, L. St John, K. Clise-Dwyer, and J. J. Molldrem. 2011. An anti-PR1/HLA-A2 T-cell receptor-like antibody mediates complement-dependent cytotoxicity against acute myeloid leukemia progenitor cells. Blood 117: 4262-4272.
[0472] 31. Davis, M. M., J. J. Boniface, Z. Reich, D. Lyons, J. Hampl, B. Arden, and Y. Chien. 1998. Ligand recognition by alpha beta T cell receptors. Annu Rev Immunol 16: 523-544.
[0473] 32. Stone, J. D., A. S. Chervin, and D. M. Kranz. 2009. T-cell receptor binding affinities and kinetics: impact on T-cell activity and specificity. Immunology 126: 165-176.
[0474] 33. Denkberg, G., C. J. Cohen, D. Segal, A. F. Kirkin, and Y. Reiter. 2000. Recombinant human single-chain MHC-peptide complexes made from E. coli By in vitro refolding: functional single-chain MHC-peptide complexes and tetramers with tumor associated antigens. Eur J Immunol 30: 3522-3532.
[0475] 34. Bronner, V., G. Denkberg, M. Peled, Y. Elbaz, E. Zahavi, H. Kasoto, Y. Reiter, A. Notcovich, and T. Bravman. 2010. Therapeutic antibodies: Discovery and development using the ProteOn XPR36 biosensor interaction array system. Anal Biochem 406: 147-156.
[0476] 35. Oved, K., O. Ziv, J. Jacob-Hirsch, R. Noy, H. Novak, O. Makler, D. Galit, S. Keren, D. Segal, C. Gefen-Dor, N. Amariglio, G. Rechavi, and Y. Reiter. 2007. A novel postpriming regulatory check point of effector/memory T cells dictated through antigen density threshold-dependent anergy. J Immunol 178: 2307-2317.
[0477] 36. Friedmann-Morvinski, D., A. Bendavid, T. Waks, D. Schindler, and Z. Eshhar. 2005. Redirected primary T cells harboring a chimeric receptor require costimulation for their antigen-specific activation. Blood 105: 3087-3093.
[0478] 37. Eshhar, Z., T. Waks, A. Bendavid, and D. G. Schindler. 2001. Functional expression of chimeric receptor genes in human T cells. J Immunol Methods 248: 67-76.
[0479] 38. Eshhar, Z., T. Waks, G. Gross, and D. G. Schindler. 1993. Specific activation and targeting of cytotoxic lymphocytes through chimeric single chains consisting of antibody-binding domains and the gamma or zeta subunits of the immunoglobulin and T-cell receptors. Proc Natl Acad Sci USA 90: 720-724.
[0480] 39. Thomas, S., S. A. Xue, M. Cesco-Gaspere, E. San Jose, D. P. Hart, V. Wong, R. Debets, B. Alarcon, E. Morris, and H. J. Stauss. 2007. Targeting the Wilms tumor antigen 1 by TCR gene transfer: TCR variants improve tetramer binding but not the function of gene modified human T cells. J immunol 179: 5803-5810.
[0481] 40. Kessels, H. W., M. C. Wolkers, M. D. van den Boom, M. A. van der Valk, and T. N. Schumacher. 2001. Immunotherapy through TCR gene transfer. Nat Immunol 2: 957-961.
[0482] 41. Kantoff, P. W., C. S. Higano, N. D. Shore, E. R. Berger, E. J. Small, D. F. Penson, C. H. Redfern, A. C. Ferrari, R. Dreicer, R. B. Sims, Y. Xu, M. W. Frohlich, P. F. Schellhammer, and I. S. Investigators. 2010. Sipuleucel-T immunotherapy for castration-resistant prostate cancer. N Engl J Med 363: 411-422.
[0483] 42. Dunn, S. M., P. J. Rizkallah, E. Baston, T. Mahon, B. Cameron, R. Moysey, F. Gao, M. Sami, J. Boulter, Y. Li, and B. K. Jakobsen. 2006. Directed evolution of human T cell receptor CDR2 residues by phage display dramatically enhances affinity for cognate peptide-MHC without increasing apparent cross-reactivity. Protein science: a publication of the Protein Sci 15: 710-721.
[0484] 43. Li, Y., R. Moysey, P. E. Molloy, A. L. Vuidepot, T. Mahon, E. Baston, S. Dunn, N. Liddy, J. Jacob, B. K. Jakobsen, and J. M. Boulter. 2005. Directed evolution of human T-cell receptors with picomolar affinities by phage display. Nat biotechnol 23: 349-354.
[0485] 44. Robbins, P. F., Y. F. Li, M. El-Gamil, Y. Zhao, J. A. Wargo, Z. Zheng, H. Xu, R. A. Morgan, S. A. Feldman, L. A. Johnson, A. D. Bennett, S. M. Dunn, T. M. Mahon, B. K. Jakobsen, and S. A. Rosenberg. 2008. Single and dual amino acid substitutions in TCR CDRs can enhance antigen-specific T cell functions. J Immunol 180: 6116-6131.
[0486] 45. Reichert, J. M., and E. Dhimolea. 2012. The future of antibodies as cancer drugs. Drug Discov Today 17: 954-963.
[0487] 46. May, C., P. Sapra, and H. P. Gerber. 2012. Advances in bispecific biotherapeutics for the treatment of cancer. Biochem Pharmacol 84: 1105-1112.
[0488] 47. Holler, P. D., L. K. Chlewicki, and D. M. Kranz. 2003. TCRs with high affinity for foreign pMHC show self-reactivity. Nat Immunol 4: 55-62.
[0489] 48. Thomas, S., S. A. Xue, C. R. Bangham, B. K. Jakobsen, E. C. Morris, and H. J. Stauss. 2011. Human T cells expressing affinity-matured TCR display accelerated responses but fail to recognize low density of MHC-peptide antigen. Blood 118: 319-329.
[0490] 49. Schmid, D. A., M. B. Irving, V. Posevitz, M. Hebeisen, A. Posevitz-Fejfar, J. C. Sarria, R. Gomez-Eerland, M. Thome, T. N. Schumacher, P. Romero, D. E. Speiser, V. Zoete, O. Michielin, and N. Rufer. 2010. Evidence for a TCR affinity threshold delimiting maximal CD8 T cell function. J Immunol 184: 4936-4946.
[0491] 50. Appay, V., D. C. Douek, and D. A. Price. 2008. CD8+ T cell efficacy in vaccination and disease. Nat Med 14: 623-628.

The application's sequence listing, which the Patent Office published only in electronic form, follows.

SEQUENCE LISTING (474 sequences)

SEQ ID NO: 1 - protein, 9 aa, Artificial sequence
  Amino acid sequence encoding WT1Db126 peptide
RMFPNAPYL

SEQ ID NO: 2 - protein, 15 aa, Artificial sequence
  Amino acid sequence encoding (Gly4Ser)3 linker peptide
GGGGSGGGGSGGGGS

SEQ ID NO: 3 - protein, 249 aa, Homo sapiens
MGSDVRDLNALLPAVPSLGGGGGCALPVSGAAQWAPVLDFAPPGASAYGSLGGPAPPPAPPPPPPPPPHSFIKQEPSWGGAEPHEEQCLSAFTVHFSGQFTGTAGACRYGPFGPPPPSQASSGQARMFPNAPYLPSCLESQPAIRNQGYSTVTFDGTPSYGHTPSHHAAQFPNHSFKHEDPMGQQGSLGEQQYSVPPPVYGCHTPTDSCTGSQALLLRTPYSSDNLYQMTSQLECMTWNQMNLGATLKG

SEQ ID NO: 4 - protein, 13 aa, Artificial sequence
  Amino acid sequence encoding GAD555-567 peptide
NFFRMVISNPAAT

SEQ ID NO: 5 - protein, 10 aa, Artificial sequence
  Amino acid sequence encoding GAD556-565 peptide
FFRMVISNPA

SEQ ID NO: 6 - protein, 21 aa, Artificial sequence
  Amino acid sequence encoding MOG-35-55 peptide
MEVGWYRPPFSRVVHLYRNGK

SEQ ID NO: 7 - protein, 9 aa, Artificial sequence
  Amino acid sequence encoding WT1 235 peptide
CMTWNQMNL

SEQ ID NO: 8 - protein, 9 aa, Artificial sequence
  Amino acid sequence encoding Tyrosinase 369-377 peptide
YMDGTMSQV

SEQ ID NO: 9 - protein, 10 aa, Artificial sequence
  Amino acid sequence encoding MART-1 antigenic peptide
EAAGIGILTV

SEQ ID NO: 10 - protein, 548 aa, Human herpesvirus 5
MESRGRRCPEMISVLGPISGHVLKAVFSRGDTPVLPHETRLLQTGIHVRVSQPSLILVSQYTPDSTPCHRGDNQLQVQHTYFTGSEVENVSVNEPMSIYVYALPLKMLNIPSINVHHYPSAAERKHRHLPVADAVIHASGKQMWQARLTVSGLAWTRQQNQWKEPDVYYTSAFVFPTKDVALRHVVCAHELVCSMENTRATKMQVIGDQYVKVYLESFCEDVPSGKLFMHVTLGSDVEEDLTMTRNPQPFMRPHERNGFTVLCPKNMIIKPGKISHIMLDVAFTSHEHFGLLCPKSIPGLSISGNLLMNGQQIFLEVQAIRETVELRQYDPVAALFFFDIDLLLQRGPQYSEHPTFTSQYRIQGKLEYRHTWDRHDEGAAQGDDDVWTSGSDSDEELVTTERKTPRVTGGGAMAGASTSAGRKRKSASSATACTSGVMTRGRLKAESTVAPEEDTDEDSDNEIHNPAVFTWPPWQAGILARNLVPMVATVQGQNLKYQEFFWDANDIYRIFAELEGVWQPAAQPKRRRHRQDALPGPCIASTPKKHRG

SEQ ID NO: 11 - protein, 561 aa, Human herpesvirus 5
MESRGRRCPEMISVLGPISGHVLKAVFSRGDTPVLPHETRLLQTGIHVRVSQPSLILVSQYTPDSTPCHRGDNQLQVQHTYFTGSEVENVSVNVHNPTGRSICPSQEPMSIYVYALPLKMLNIPSINVHHYPSAAERKHRHLPVADAVIHASGKQMWQARLTVSGLAWTRQQNQWKEPDVYYTSAFVFPTKDVALRHVVCAHELVCSMENTRATKMQVIGDQYVKVYLESFCEDVPSGKLFMHVTLGSDVEEDLTMTRNPQPFMRPHERNGFTVLCPKNMIIKPGKISHIMLDVAFTSHEHFGLLCPKSIPGLSISGNLLMNGQQIFLEVQAIRETVELRQYDPVAALFFFDIDLLLQRGPQYSEHPTFTSQYRIQGKLEYRHTWDRHDEGAAQGDDDVWTSGSDSDEELVTTERKTPRVTGGGAMAGASTSAGRKRKSASSATACTSGVMTRGRLKAESTVAPEEDTDEDSDNEIHNPAVFTWPPWQAGILARNLVPMVATVQGQNLKYQEFFWDANDIYRIFAELEGVWQPAAQPKRRRHRQDALPGPCIASTPKKHRG

SEQ ID NO: 12 - protein, 9 aa, Artificial sequence
  Amino acid sequence encoding gp100: G2-209-2M peptide
IMDQVPFSV

SEQ ID NO: 13 - protein, 9 aa, Artificial sequence
  Amino acid sequence encoding gp100-280 peptide
YLEPGPVTA

SEQ ID NO: 14 - protein, 9 aa, Artificial sequence
  Amino acid sequence encoding HIV Gag peptide
SLYNYVATL

SEQ ID NO: 15 - protein, 8 aa, Artificial sequence
  Amino acid sequence encoding MDM2
LLGDLFGV

SEQ ID NO: 16 - protein, 114 aa, Artificial sequence
  Amino acid sequence encoding VL of F2 CAR
LNFMLTQPHSVSESPGKTVTISCTRSSGSIASNYVQWYQQRPGSSPTTVIYEDNQRPSGVPDRFSGSIDSSSNSASLTISGLKTEDEADYYCQSYDSSNQNWVFGGGTKLTVLS

SEQ ID NO: 17 - protein, 117 aa, Artificial sequence
  Amino acid sequence encoding VH of F2 CAR
QVQLVQSGGGLVKPGGSLRLSCAASGFTFSSYSMNWVRQAPGKGLEWVSSISSSSSYIYYADSVKGRFTISRDNAKNSLYLQMNSLRAEDTAVYYCARGDYYGLTFDPWGQGTLVTV

SEQ ID NO: 18 - protein, 342 aa, Artificial sequence
  polynucleotide encoding VL of F2 CAR
CTGAACTTCATGCTGACCCAGCCCCACAGCGTGTCCGAGAGCCCCGGCAAGACCGTGACCATCAGCTGCACCAGAAGCAGCGGCAGCATTGCCAGCAACTACGTGCAGTGGTATCAGCAGAGGCCCGGCAGCAGCCCCACCACCGTGATCTACGAGGACAACCAGCGGCCCAGCGGCGTGCCCGACCGGTTCAGCGGCTCCATCGACAGCAGCTCCAACAGCGCCAGCCTGACCATCTCCGGCCTGAAAACCGAGGACGAGGCCGACTATTACTGCCAGTCTTACGACAGCAGCAACCAGAACTGGGTGTTCGGCGGAGGTACAAAGCTGACCGTGCTGTCG

SEQ ID NO: 19 - protein, 351 aa, Artificial sequence
  polynucleotide encoding VH of F2 CAR
CAGGTGCAGCTGGTGCAGTCTGGCGGCGGACTGGTCAAGCCTGGCGGCAGCCTGAGACTGAGCTGCGCCGCCAGCGGCTTCACCTTCAGCAGCTACAGCATGAACTGGGTCCGCCAGGCTCCTGGCAAGGGCCTGGAATGGGTGTCCAGCATCAGCAGCAGCAGCTCCTACATCTACTACGCCGACAGCGTGAAGGGCCGGTTCACCATCAGCCGGGACAACGCCAAGAACAGCCTGTACCTGCAGATGAACAGCCTGCGGGCCGAGGACACCGCCGTGTACTACTGCGCCAGGGGCGACTACTACGGCCTGACCTTCGACCCCTGGGGACAGGGCACCCTGGTCACCGTG

SEQ ID NO: 20 - protein, 21 aa, Artificial sequence
  Amino acid sequence encoding leader in CAR
MDFQVQIFSFLLISASVIMSR

SEQ ID NO: 21 - protein, 63 aa, Artificial sequence
  polynucleotide encoding leader in CAR
ATGGATTTTCAGGTGCAGATTTTCAGCTTCCTGCTAATCAGTGCCTCAGTCATAATGTCTAGA

SEQ ID NO: 22 - protein, 16 aa, Artificial sequence
  Amino acid sequence encoding MBP-85-99
MENPVVHFFKNIVTPR

SEQ ID NO: 23 - protein, 45 aa, Artificial sequence
  polynucleotide encoding linker between VL and VH in CAR
GGCGGAGGGGGCTCTGGCGGGGGAGGATCTGGGGGCGGAGGAAGC

SEQ ID NO: 24 - protein, 87 aa, Artificial sequence
  Amino acid sequence encoding CD28 in  CAR
KGKHLCPSPLFPGPSKPFWVLVVVGGVLACYSLLVTVAFIIFWVRSKRSRLLHSDYMNMTPRRPGPTRKHYQPYAPPRDFAAYRSQV

SEQ ID NO: 25 - protein, 261 aa, Artificial sequence
  polynucleotide encoding CD28 in  CAR
AAAGGGAAACACCTTTGTCCAAGTCCCCTATTTCCCGGACCTTCTAAGCCCTTTTGGGTGCTGGTGGTGGTTGGTGGAGTCCTGGCTTGCTATAGCTTGCTAGTAACAGTGGCCTTTATTATTTTCTGGGTGAGGAGTAAGAGGAGCAGGCTCCTGCACAGTGACTACATGAACATGACTCCCCGCCGCCCCGGGCCCACCCGCAAGCATTACCAGCCCTATGCCCCACCACGCGACTTCGCAGCCTATAGATCTCAAGTG

SEQ ID NO: 26 - protein, 24 aa, Artificial sequence
  Amino acid sequence encoding Gamma in CAR
RKAAITSYEKSDGVYTGLSTRNQE

SEQ ID NO: 27 - protein, 72 aa, Artificial sequence
  polynucleotide encoding Gamma in  CAR
CGAAAGGCAGCTATAACCAGCTATGAGAAATCAGATGGTGTTTACACGGGCCTGAGCACCAGGAACCAGGAG

SEQ ID NO: 28 - protein, 110 aa, Artificial sequence
  Amino acid sequence encoding VL of F3 CAR
ALSSELTQDPAVSVALGQTVKITCQGDSLRIHYASWYQQKPGQAPVLVIYGKDNRPSGIPDRFSGSSSGTSASLTITGARAEDEADYYCNSRDNSGDHVLFGGGTKLTVV

SEQ ID NO: 29 - protein, 115 aa, Artificial sequence
  Amino acid sequence encoding VH of F3 CAR
EVQLVQSGAEVKKTGSSVKVSCKASGYTFTYRYLHWARQAPGQALEWMGWITPFNGNTNYAQKFQDRVTITRDRSMSTAYMELSSLRSEDTAMYYCASSAYDAFDIWGQGTMVTV

SEQ ID NO: 30 - protein, 330 aa, Artificial sequence
  polynucleotide encoding VL of F3 CAR
GCACTTTCTTCTGAGCTGACTCAGGACCCTGCTGTGTCTGTGGCCTTGGGACAGACAGTCAAGATCACATGCCAAGGAGACAGCCTCAGGATCCATTATGCAAGCTGGTACCAACAGAAGCCAGGACAGGCCCCTGTCCTTGTCATCTATGGTAAAGACAACCGGCCCTCAGGAATCCCCGACCGATTCTCTGGCTCCAGCTCAGGAACCTCCGCTTCCCTGACTATCACTGGGGCTCGGGCGGAGGATGAGGCTGACTATTACTGTAACTCCCGGGACAATAGTGGTGATCATGTGCTCTTCGGCGGAGGGACCAAGTTGACCGTCGTG

SEQ ID NO: 31 - protein, 345 aa, Artificial sequence
  polynucleotide encoding VH of F3 CAR
GAGGTGCAGCTGGTGCAGTCTGGGGCTGAGGTGAAGAAGACTGGGTCCTCAGTGAAGGTTTCCTGCAAGGCTTCCGGATACACCTTCACCTACCGCTACCTGCACTGGGCGCGACAGGCCCCCGGACAAGCGCTTGAGTGGATGGGATGGATCACACCTTTCAATGGTAACACCAACTACGCACAGAAATTCCAGGACAGAGTCACCATTACCAGGGACAGGTCTATGAGCACAGCCTACATGGAGCTGAGCAGCCTGAGATCTGAGGACACAGCCATGTATTACTGTGCAAGCTCAGCCTATGATGCTTTTGATATCTGGGGCCAAGGGACAATGGTCACCGTG

SEQ ID NO: 32 - protein, 13 aa, Artificial sequence
  Amino acid sequence encoding GAD autoantigenic peptide
NFFRMVISNPAAT

SEQ ID NO: 33 - protein, 13 aa, Artificial sequence
  Amino acid sequence encoding a short peptide
NFFRMVISNPAAT

SEQ ID NO: 34 - protein, 135 aa, Artificial sequence
  polynucleotide encoding CD8a hinge domain
ACCACGACGCCAGCGCCGCGACCACCAACACCGGCGCCCACCATCGCGTCGCAGCCCCTGTCCCTGCGCCCAGAGGCGTGCCGGCCAGCGGCGGGGGGCGCAGTGCACACGAGGGGGCTGGACTTCGCCTGTGAT

SEQ ID NO: 35 - protein, 47 aa, Artificial sequence
  Amino acid sequence encoding CD8a hinge domain
TTTPAPRPPTPAPTIASQPLSLRPEACRPAAGGAVHTRGLDFACDIY

SEQ ID NO: 36 - protein, 110 aa, Homo sapiens
MALWMRLLPLLALLALWGPDPAAAFVNQHLCGSHLVEALYLVCGERGFFYTPKTRREAEDLQVGQVELGGGPGAGSLQPLALEGSLQKRGIVEQCCTSICSLYQLENYCN

SEQ ID NO: 37 - protein, 86 aa, Homo sapiens
FVNQHLCGSHLVEALYLVCGERGFFYTPKTRREAEDLQVGQVELGGGPGAGSLQPLALEGSLQKRGIVEQCCTSICSLYQLENYCN

SEQ ID NO: 38 - protein, 585 aa, Homo sapiens
MASPGSGFWSFGSEDGSGDSENPGTARAWCQVAQKFTGGIGNKLCALLYGDAEKPAESGGSQPPRAAARKAACACDQKPCSCSKVDVNYAFLHATDLLPACDGERPTLAFLQDVMNILLQYVVKSFDRSTKVIDFHYPNELLQEYNWELADQPQNLEEILMHCQTTLKYAIKTGHPRYFNQLSTGLDMVGLAADWLTSTANTNMFTYEIAPVFVLLEYVTLKKMREIIGWPGGSGDGIFSPGGAISNMYAMMIARFKMFPEVKEKGMAALPRLIAFTSEHSHFSLKKGAAALGIGTDSVILIKCDERGKMIPSDLERRILEAKQKGFVPFLVSATAGTTVYGAFDPLLAVADICKKYKIWMHVDAAWGGGLLMSRKHKWKLSGVERANSVTWNPHKMMGVPLQCSALLVREEGLMQNCNQMHASYLFQQDKHYDLSYDTGDKALQCGRHVDVFKLWLMWRAKGTTGFEAHVDKCLELAEYLYNIIKNREGYEMVFDGKPQHTNVCFWYIPPSLRTLEDNEERMSRLSKVAPVIKARMMEYGTTMVSYQPLGDKVNFFRMVISNPAATHQDIDFLIEEIERLGQDL

SEQ ID NO: 39 - protein, 566 aa, Homo sapiens
MPRGFLVKRTKRTGGLYRVRLAERVFPLLGPQGAPPFLEEAPSASLPGAERATPPTREEPGKGLTAEAAREQSGSPCRAAGVSPGTGGREGAEWRAGGREGPGPSPSPSPSPAKPAGAELRRAFLERCLSSPVSAESFPGGAAAVAAFSCSVAPAAAPTPGEQFLLPLRAPFPEPALQPDPAPLSAALQSLKRAAGGERRGKAPTDCASGPAAAGIKKPKAMRKLSFADEVTTSPVLGLKIKEEEPGAPSRGLGGSRTPLGEFICQLCKEQYADPFALAQHRCSRIVRVEYRCPECDKVFSCPANLASHRRWHKPRPAAANAATVSSADGKPPSSSSSSSRDSGAIASFLAEGKENSRIERTADQHPQARDSSGADQHPDSAPRQGLQVLTHPEPPLPQGPYTEGVLGRRVPVPGSTSGGRGSEIFVCPYCHKKFRRQAYLRKHLSTHEAGSARALAPGFGSERGAPLAFACPLCGAHFPTADIREKHRLWHAVREELLLPALAGAPPETSGPSGPSDGSAQQIFSCKHCPSTFFSSPGLTRHINKCHPSESRQVLLLQMPLRPGC

SEQ ID NO: 40 - protein, 998 aa, Homo sapiens
MGPPLPLLLLLLLLLPPRVLPAAPSSVPRGRQLPGRLDGVFGRCQKVPAMDFYRYEVSPVALQRLRVALQKLSGTGFTWQDDYTQYVMDQELADLPKTYLRRPEASSPARPSKHSVGSERRYSREGGAALANALRRHLPFLEALSQAPASDVLARTHTAQDRPPAEGDDRFSESILTYVAHTSALTYPPGSRTQLREDLLPRTLGQLQPDELSPKVDSGVDRHHLMAALSAYAAQRPPAPPGEGSLEPQYLLRAPSRMPRPLLAPAAPQKWPSPLGDSEDPSSTGDGARIHTLLKDLQRQPAEVRGLSGLELDGMAELMAGLMQGVDHGVARGSPGRAALGESGEQADGPKATLRGDSFPDDGVQDDDDRLYQEVHRLSATLGGLLQDHGSRLLPGALPFARPLDMERKKSEHPESSLSSEEETAGVENVKSQTYSKDLLGQQPHSEPGAAAFGELQNQMPGPSKEEQSLPAGAQEALSDGLQLEVQPSEEEARGYIVTDRDPLRPEEGRRLVEDVARLLQVPSSAFADVEVLGPAVTFKVSANVQNVTTEDVEKATVDNKDKLEETSGLKILQTGVGSKSKLKFLPPQAEQEDSTKFIALTLVSLACILGVLLASGLIYCLRHSSQHRLKEKLSGLGGDPGADATAAYQELCRQRMATRPPDRPEGPHTSRISSVSSQFSDGPIPSPSARSSASSWSEEPVQSNMDISTGHMILSYMEDHLKNKNRLEKEWEALCAYQAEPNSSFVAQREENVPKNRSLAVLTYDHSRVLLKAENSHSHSDYINASPIMDHDPRNPAYIATQGPLPATVADFWQMVWESGCVVIVMLTPLAENGVRQCYHYWPDEGSNLYHIYEVNLVSEHIWCEDFLVRSFYLKNLQTNETRTVTQFHFLSWYDRGVPSSSRSLLDFRRKVNKCYRGRSCPIIVHCSDGAGRSGTYVLIDMVLNKMAKGAKEIDIAATLEHLRDQRPGMVQTKEQFEFALTAVAEEVNAILKALPQ

SEQ ID NO: 41 - protein, 986 aa, Homo sapiens
MGPPLPLLLLLLLLLPPRVLPAAPSSVPRGRQLPGRLGCLLEEGLCGASEACVNDGVFGRCQKVPAMDFYRYEVSPVALQRLRVALQKLSGTGFTWQDDYTQYVMDQELADLPKTYLRRPEASSPARPSKHSVGSERRYSREGGAALANALRRHLPFLEALSQAPASDVLARTHTAQDRPPAEGDDRFSESILTYVAHTSALTYPPGSRTQLREDLLPRTLGQLQPDELSPKVDSGVDRHHLMAALSAYAAQRPPAPPGEGSLEPQYLLRAPSRMPRPLLAPAAPQKWPSPLGDSEDPSSTGDGARIHTLLKDLQRQPAEVRGLSGLELDGMAELMAGLMQGVDHGVARGSPGRAALGESGEQADGPKATLRGDSFPDDGVQDDDDRLYQEVHRLSATLGGLLQDHGSRLLPGALPFARPLDMERKKSEHPESSLSSEEETAGVENVKSQTYSKDLLGQQPHSEPGAAAFGELQNQMPGPSKEEQSLPAGAQEALSDGLQLEVQPSEEEARGYIVTDREVLGPAVTFKVSANVQNVTTEDVEKATVDNKDKLEETSGLKILQTGVGSKSKLKFLPPQAEQEDSTKFIALTLVSLACILGVLLASGLIYCLRHSSQHRLKEKLSGLGGDPGADATAAYQELCRQRMATRPPDRPEGPHTSRISSVSSQFSDGPIPSPSARSSASSWSEEPVQSNMDISTGHMILSYMEDHLKNKNRLEKEWEALCAYQAEPNSSFVAQREENVPKNRSLAVLTYDHSRVLLKAENSHSHSDYINASPIMDHDPRNPAYIATQGPLPATVADFWQMVWESGCVVIVMLTPLAENGVRQCYHYWPDEGSNLYHIYEVNLVSEHIWCEDFLVRSFYLKNLQTNETRTVTQFHFLSWYDRGVPSSSRSLLDFRRKVNKCYRGRSCPIIVHCSDGAGRSGTYVLIDMVLNKMAKGAKEIDIAATLEHLRDQRPGMVQTKEQFEFALTAVAEEVNAILKALPQ

SEQ ID NO: 42 - protein, 1015 aa, Homo sapiens
MGPPLPLLLLLLLLLPPRVLPAAPSSVPRGRQLPGRLGCLLEEGLCGASEACVNDGVFGRCQKVPAMDFYRYEVSPVALQRLRVALQKLSGTGFTWQDDYTQYVMDQELADLPKTYLRRPEASSPARPSKHSVGSERRYSREGGAALANALRRHLPFLEALSQAPASDVLARTHTAQDRPPAEGDDRFSESILTYVAHTSALTYPPGSRTQLREDLLPRTLGQLQPDELSPKVDSGVDRHHLMAALSAYAAQRPPAPPGEGSLEPQYLLRAPSRMPRPLLAPAAPQKWPSPLGDSEDPSSTGDGARIHTLLKDLQRQPAEVRGLSGLELDGMAELMAGLMQGVDHGVARGSPGRAALGESGEQADGPKATLRGDSFPDDGVQDDDDRLYQEVHRLSATLGGLLQDHGSRLLPGALPFARPLDMERKKSEHPESSLSSEEETAGVENVKSQTYSKDLLGQQPHSEPGAAAFGELQNQMPGPSKEEQSLPAGAQEALSDGLQLEVQPSEEEARGYIVTDRDPLRPEEGRRLVEDVARLLQVPSSAFADVEVLGPAVTFKVSANVQNVTTEDVEKATVDNKDKLEETSGLKILQTGVGSKSKLKFLPPQAEQEDSTKFIALTLVSLACILGVLLASGLIYCLRHSSQHRLKEKLSGLGGDPGADATAAYQELCRQRMATRPPDRPEGPHTSRISSVSSQFSDGPIPSPSARSSASSWSEEPVQSNMDISTGHMILSYMEDHLKNKNRLEKEWEALCAYQAEPNSSFVAQREENVPKNRSLAVLTYDHSRVLLKAENSHSHSDYINASPIMDHDPRNPAYIATQGPLPATVADFWQMVWESGCVVIVMLTPLAENGVRQCYHYWPDEGSNLYHIYEVNLVSEHIWCEDFLVRSFYLKNLQTNETRTVTQFHFLSWYDRGVPSSSRSLLDFRRKVNKCYRGRSCPIIVHCSDGAGRSGTYVLIDMVLNKMAKGAKEIDIAATLEHLRDQRPGMVQTKEQFEFALTAVAEEVNAILKALPQ

SEQ ID NO: 43 - protein, 355 aa, Homo sapiens
MDFLHRNGVLIIQHLQKDYRAYYTFLNFMSNVGDPRNIFFIYFPLCFQFNQTVGTKMIWVAVIGDWLNLIFKWILFGHRPYWWVQETQIYPNHSSPCLEQFPTTCETGPGSPSGHAMGASCVWYVMVTAALSHTVCGMDKFSITLHRLTWSFLWSVFWLIQISVCISRVFIATHFPHQVILGVIGGMLVAEAFEHTPGIQTASLGTYLKTNLFLFLFAVGFYLLLRVLNIDLLWSVPIAKKWCANPDWIHIDTTPFAGLVRNLGVLFGLGFAINSEMFLLSCRGGNNYTLSFRLLCALTSLTILQLYHFLQIPTHEEHLFYVLSFCKSASIPLTVVAFIPYSVHMLMKQSGKKSQ

SEQ ID NO: 44 - protein, 154 aa, Homo sapiens
MDFLHRNGVLIIQHLQKDYRAYYTFLNFMSNVGDPRNIFFIYFPLCFQFNQTVGTKMIWVAVIGDWLNLIFKWILFGHRPYWWVQETQIYPNHSSPCLEQFPTTCETGPGSPSGHAMGASCVWYVMVTAALSHTVCGMDKFSITLHRHAGGRGL

SEQ ID NO: 45 - protein, 457 aa, Homo sapiens
MRSAAVLALLLCAGQVTALPVNSPMNKGDTEVMKCIVEVISDTLSKPSPMPVSQECFETLRGDERILSILRHQNLLKELQDLALQGAKERAHQQKKHSGFEDELSEVLENQSSQAELKEAVEEPSSKDVMEKREDSKEAEKSGEATDGARPQALPEPMQESKAEGNNQAPGEEEEEEEEATNTHPPASLPSQKYPGPQAEGDSEGLSQGLVDREKGLSAEPGWQAKREEEEEEEEEAEAGEEAVPEEEGPTVVLNPHPSLGYKEIRKGESRSEALAVDGAGKPGAEEAQDPEGKGEQEHSQQKEEEEEMAVVPQGLFRGGKSGELEQEEERLSKEWEDSKRWSKMDQLAKELTAEKRLEGQEEEEDNRDSSMKLSFRARAYGFRGPGPQLRRGWRPSSREDSLEAGLPLQVRGYPEEKKEEEGSANRRPEDQELESLSAIEAELEKVAHQLQALRRG

SEQ ID NO: 46 - protein, 369 aa, Homo sapiens
MEFLERTYLVNDKAAKMYAFTLESVELQQKPVNKDQCPRERPEELESGGMYHCHSGSKPTEKGANEYAYAKWKLCSASAICFIFMIAEVVGGHIAGSLAVVTDAAHLLIDLTSFLLSLFSLWLSSKPPSKRLTFGWHRAEILGALLSILCIWVVTGVLVYLACERLLYPDYQIQATVMIIVSSCAVAANIVLTVVLHQRCLGHNHKEVQANASVRAAFVHALGDLFQSISVLISALIIYFKPEYKIADPICTFIFSILVLASTITILKDFSILLMEGVPKSLNYSGVKELILAVDGVLSVHSLHIWSLTMNQVILSAHVATAASRDSQVVRREIAKALSKSFTMHSLTIQMESPVDQDPDCLFCEDPCD

SEQ ID NO: 47 - protein, 573 aa, Homo sapiens
MLRLPTVFRQMRPVSRVLAPHLTRAYAKDVKFGADARALMLQGVDLLADAVAVTMGPKGRTVIIEQSWGSPKVTKDGVTVAKSIDLKDKYKNIGAKLVQDVANNTNEEAGDGTTTATVLARSIAKEGFEKISKGANPVEIRRGVMLAVDAVIAELKKQSKPVTTPEEIAQVATISANGDKEIGNIISDAMKKVGRKGVITVKDGKTLNDELEIIEGMKFDRGYISPYFINTSKGQKCEFQDAYVLLSEKKISSIQSIVPALEIANAHRKPLVIIAEDVDGEALSTLVLNRLKVGLQVVAVKAPGFGDNRKNQLKDMAIATGGAVFGEEGLTLNLEDVQPHDLGKVGEVIVTKDDAMLLKGKGDKAQIEKRIQEIIEQLDVTTSEYEKEKLNERLAKLSDGVAVLKVGGTSDVEVNEKKDRVTDALNATRAAVEEGIVLGGGCALLRCIPALDSLTPANEDQKIGIEIIKRTLKIPAMTIAKNAGVEGSLIVEKIMQSSSEVGYDAMAGDFVNMVEKGIIDPTKVVRTALLDAAGVASLLTTAEVVVTEIPKEEKDPGMGAMGGMGGGMGGGMF

SEQ ID NO: 48 - protein, 641 aa, Homo sapiens
MAKAAAIGIDLGTTYSCVGVFQHGKVEIIANDQGNRTTPSYVAFTDTERLIGDAAKNQVALNPQNTVFDAKRLIGRKFGDPVVQSDMKHWPFQVINDGDKPKVQVSYKGETKAFYPEEISSMVLTKMKEIAEAYLGYPVTNAVITVPAYFNDSQRQATKDAGVIAGLNVLRIINEPTAAAIAYGLDRTGKGERNVLIFDLGGGTFDVSILTIDDGIFEVKATAGDTHLGGEDFDNRLVNHFVEEFKRKHKKDISQNKRAVRRLRTACERAKRTLSSSTQASLEIDSLFEGIDFYTSITRARFEELCSDLFRSTLEPVEKALRDAKLDKAQIHDLVLVGGSTRIPKVQKLLQDFFNGRDLNKSINPDEAVAYGAAVQAAILMGDKSENVQDLLLLDVAPLSLGLETAGGVMTALIKRNSTIPTKQTQIFTTYSDNQPGVLIQVYEGERAMTKDNNLLGRFELSGIPPAPRGVPQIEVTFDIDANGILNVTATDKSTGKANKITITNDKGRLSKEEIERMVQEAEKYKAEDEVQRERVSAKNALESYAFNMKSAVEDEGLKGKISEADKKKVLDKCQEVISWLDANTLAEKDEFEHKRKELEQVCNPIISGLYQGAGGPGPGGFGAQGPKGGSGSGPTIEEVD

SEQ ID NO: 49 - protein, 641 aa, Homo sapiens; identical to SEQ ID NO: 48

SEQ ID NO: 50 - protein, 2824 aa, Homo sapiens
GCGGCCGCCCGCACTTCCCGCCTCTGGCTCGCCCGAGGACGCGCTGGCACGCCTCCCACCCCCTCACTCTGACTCCAGCTGGCGTGCATGGTCTGCCTCGCATCCTCACGACTCAGCTCCCTCCCTCTCTCGTGTTTTTTTCCTCCGCCGCCCCCTCATTCATCCCCACTGGGCTCCCTTTCCCTCAAATGCTCTGGGGCTCTCCGCGCTTTCCTGAGTCCGGGCTCCGAGGACCCTTAGGTAGTCCCGGTCTCTTTTAAAGCTCCCCGGCTTCCAAAGGGTTGCCACGTCCCTAAACCCTGTCTCCAGCTCGCATACACACACGCACAGACACGCACGTTTTCTGTTCCTGCGTGACACCCGCCCTCGCCGCTCGGCCCCGCCGGTCCCCGCGCGGTGCCCTCCTCCCGCCACACGGGCACGCACGCGCGCGCAGGGCCAAGCCCGAGGCAGCTCGCCCGCAGCTCGCACTCGCAGGCGACCTGCTCCAGTCTCCAAAGCCGATGGCATCTCCGGGCTCTGGCTTTTGGTCTTTCGGGTCGGAAGATGGCTCTGGGGATTCCGAGAATCCCGGCACAGCGCGAGCCTGGTGCCAAGTGGCTCAGAAGTTCACGGGCGGCATCGGAAACAAACTGTGCGCCCTGCTCTACGGAGACGCCGAGAAGCCGGCGGAGAGCGGCGGGAGCCAACCCCCGCGGGCCGCCGCCCGGAAGGCCGCCTGCGCCTGCGACCAGAAGCCCTGCAGCTGCTCCAAAGTGGATGTCAACTACGCGTTTCTCCATGCAACAGACCTGCTGCCGGCGTGTGATGGAGAAAGGCCCACTTTGGCGTTTCTGCAAGATGTTATGAACATTTTACTTCAGTATGTGGTGAAAAGTTTCGATAGATCAACCAAAGTGATTGATTTCCATTATCCTAATGAGCTTCTCCAAGAATATAATTGGGAATTGGCAGACCAACCACAAAATTTGGAGGAAATTTTGATGCATTGCCAAACAACTCTAAAATATGCAATTAAAACAGGGCATCCTAGATACTTCAATCAACTTTCTACTGGTTTGGATATGGTTGGATTAGCAGCAGACTGGCTGACATCAACAGCAAATACTAACATGTTCACCTATGAAATTGCTCCAGTATTTGTGCTTTTGGAATATGTCACACTAAAGAAAATGAGAGAAATCATTGGCTGGCCAGGGGGCTCTGGCGATGGGATATTTTCTCCCGGTGGCGCCATATCTAACATGTATGCCATGATGATCGCACGCTTTAAGATGTTCCCAGAAGTCAAGGAGAAAGGAATGGCTGCTCTTCCCAGGCTCATTGCCTTCACGTCTGAACATAGTCATTTTTCTCTCAAGAAGGGAGCTGCAGCCTTAGGGATTGGAACAGACAGCGTGATTCTGATTAAATGTGATGAGAGAGGGAAAATGATTCCATCTGATCTTGAAAGAAGGATTCTTGAAGCCAAACAGAAAGGGTTTGTTCCTTTCCTCGTGAGTGCCACAGCTGGAACCACCGTGTACGGAGCATTTGACCCCCTCTTAGCTGTCGCTGACATTTGCAAAAAGTATAAGATCTGGATGCATGTGGATGCAGCTTGGGGTGGGGGATTACTGATGTCCCGAAAACACAAGTGGAAACTGAGTGGCGTGGAGAGGGCCAACTCTGTGACGTGGAATCCACACAAGATGATGGGAGTCCCTTTGCAGTGCTCTGCTCTCCTGGTTAGAGAAGAGGGATTGATGCAGAATTGCAACCAAATGCATGCCTCCTACCTCTTTCAGCAAGATAAACATTATGACCTGTCCTATGACACTGGAGACAAGGCCTTACAGTGCGGACGCCACGTTGATGTTTTTAAACTATGGCTGATGTGGAGGGCAAAGGGGACTACCGGGTTTGAAGCGCATGTTGATAAATGTTTGGAGTTGGCAGAGTATTTATACAACATCATAAAAAACCGAGAAGGATATGAGATGGTGTTTGATGGGAAGCCTCAGCACACAAATGTCTGCTTCTGGTACATTCCTCCAAGCTTGCGTACTCTGGAAGACAATGAAGAGAGAATGAGTCGCCTCTCGAAGGTGGCTCCAGTGATTAAAGCCAGAATGATGGAGTATGGAACCACAATGGTCAGCTACCAACCCTTGGGAGACAAGGTCAATTTCTTCCGCATGGTCATCTCAAACCCAGCGGCAACTCACCAAGACATTGACTTCCTGATTGAAGAAATAGAACGCCTTGGACAAGATTTATAATAACCTTGCTCACCAAGCTGTTCCACTTCTCTAGAGAACATGCCCTCAGCTAAGCCCCCTACTGAGAAACTTCCTTTGAGAATTGTGCGACTTCACAAAATGCAAGGTGAACACCACTTTGTCTCTGAGAACAGACGTTACCAATTATGGAGTGTCACCAGCTGCCAAAATCGTAGGTGTTGGCTCTGCTGGTCACTGGAGTAGTTGCTACTCTTCAGAATATGGACAAAGAAGGCACAGGTGTAAATATAGTAGCAGGATGAGGAACCTCAAACTGGGTATCATTTTGCACGTGCTCTTCTGTTCTCAAATGCTAAATGCAAACACTGTGTATTTATTAGTTAGGTGTGCCAAACTACCGTTCCCAAATTGGTGTTTCTGAATGACATCAACATTCCCCCAACATTACTCCATTACTAAAGACAGAAAAAAATAAAAACATAAAATATACAAACATGTGGCAACCTGTTCTTCCTACCAAATATAAACTTGTGTATGATCCAAGTATTTTATCTGTGTTGTCTCTCTAAACCCAAATAAATGTGTAAATGTGGACACATCTC

SEQ ID NO: 51 - protein, 2419 aa, Homo sapiens
GCGGCCGCCCGCACTTCCCGCCTCTGGCTCGCCCGAGGACGCGCTGGCACGCCTCCCACCCCCTCACTCTGACTCCAGCTGGCGTGCATGGTCTGCCTCGCATCCTCACGACTCAGCTCCCTCCCTCTCTCGTGTTTTTTTCCTCCGCCGCCCCCTCATTCATCCCCACTGGGCTCCCTTTCCCTCAAATGCTCTGGGGCTCTCCGCGCTTTCCTGAGTCCGGGCTCCGAGGACCCTTAGGTAGTCCCGGTCTCTTTTAAAGCTCCCCGGCTTCCAAAGGGTTGCCACGTCCCTAAACCCTGTCTCCAGCTCGCATACACACACGCACAGACACGCACGTTTTCTGTTCCTGCGTGACACCCGCCCTCGCCGCTCGGCCCCGCCGGTCCCCGCGCGGTGCCCTCCTCCCGCCACACGGGCACGCACGCGCGCGCAGGGCCAAGCCCGAGGCAGCTCGCCCGCAGCTCGCACTCGCAGGCGACCTGCTCCAGTCTCCAAAGCCGATGGCATCTCCGGGCTCTGGCTTTTGGTCTTTCGGGTCGGAAGATGGCTCTGGGGATTCCGAGAATCCCGGCACAGCGCGAGCCTGGTGCCAAGTGGCTCAGAAGTTCACGGGCGGCATCGGAAACAAACTGTGCGCCCTGCTCTACGGAGACGCCGAGAAGCCGGCGGAGAGCGGCGGGAGCCAACCCCCGCGGGCCGCCGCCCGGAAGGCCGCCTGCGCCTGCGACCAGAAGCCCTGCAGCTGCTCCAAAGTGGATGTCAACTACGCGTTTCTCCATGCAACAGACCTGCTGCCGGCGTGTGATGGAGAAAGGCCCACTTTGGCGTTTCTGCAAGATGTTATGAACATTTTACTTCAGTATGTGGTGAAAAGTTTCGATAGATCAACCAAAGTGATTGATTTCCATTATCCTAATGAGCTTCTCCAAGAATATAATTGGGAATTGGCAGACCAACCACAAAATTTGGAGGAAATTTTGATGCATTGCCAAACAACTCTAAAATATGCAATTAAAACAGGGCATCCTAGATACTTCAATCAACTTTCTACTGGTTTGGATATGGTTGGATTAGCAGCAGACTGGCTGACATCAACAGCAAATACTAACATGTTCACCTATGAAATTGCTCCAGTATTTGTGCTTTTGGAATATGTCACACTAAAGAAAATGAGAGAAATCATTGGCTGGCCAGGGGGCTCTGGCGATGGGATATTTTCTCCCGGTGGCGCCATATCTAACATGTATGCCATGATGATCGCACGCTTTAAGATGTTCCCAGAAGTCAAGGAGAAAGGAATGGCTGCTCTTCCCAGGCTCATTGCCTTCACGTCTGAACATAGTCATTTTTCTCTCAAGAAGGGAGCTGCAGCCTTAGGGATTGGAACAGACAGCGTGATTCTGATTAAATGTGATGAGAGAGGGAAAATGATTCCATCTGATCTTGAAAGAAGGATTCTTGAAGCCAAACAGAAAGGGTTTGTTCCTTTCCTCGTGAGTGCCACAGCTGGAACCACCGTGTACGGAGCATTTGACCCCCTCTTAGCTGTCGCTGACATTTGCAAAAAGTATAAGATCTGGATGCATGTGGATGCAGCTTGGGGTGGGGGATTACTGATGTCCCGAAAACACAAGTGGAAACTGAGTGGCGTGGAGAGGGCCAACTCTGTGACGTGGAATCCACACAAGATGATGGGAGTCCCTTTGCAGTGCTCTGCTCTCCTGGTTAGAGAAGAGGGATTGATGCAGAATTGCAACCAAATGCATGCCTCCTACCTCTTTCAGCAAGATAAACATTATGACCTGTCCTATGACACTGGAGACAAGGCCTTACAGTGCGGACGCCACGTTGATGTTTTTAAACTATGGCTGATGTGGAGGGCAAAGGGGACTACCGGGTTTGAAGCGCATGTTGATAAATGTTTGGAGTTGGCAGAGTATTTATACAACATCATAAAAAACCGAGAAGGATATGAGATGGTGTTTGATGGGAAGCCTCAGCACACAAATGTCTGCTTCTGGTACATTCCTCCAAGCTTGCGTACTCTGGAAGACAATGAAGAGAGAATGAGTCGCCTCTCGAAGGTGGCTCCAGTGATTAAAGCCAGAATGATGGAGTATGGAACCACAATGGTCAGCTACCAACCCTTGGGAGACAAGGTCAATTTCTTCCGCATGGTCATCTCAAACCCAGCGGCAACTCACCAAGACATTGACTTCCTGATTGAAGAAATAGAACGCCTTGGACAAGATTTATAATAACCTTGCTCACCAAGCTGTTCCACTTCTCTAGGTAGACAATTAAGTTGTCACAAACTGTGTGAATGTATTTGTAGTTTGTTCCAAAGTAAATCTATTTCTATATTGTGGTGTCAAAGTAGAGTTTAAAAATTAAACAAAAAAGACATTGCTCCTTT

SEQ ID NO: 52 - protein, 3488 aa, Homo sapiens
GCAAAACCGTGAGCTGGATTTATAATCGCCCTATAAAGCTCCAGAGGCGGTCAGGCACCTGCAGAGGAGCCCCGCCGCTCCGCCGACTAGCTGCCCCCGCGAGCAACGGCCTCGTGATTTCCCCGCCGATCCGGTCCCCGCCTCCCCACTCTGCCCCCGCCTACCCCGGAGCCGTGCAGCCGCCTCTCCGAATCTCTCTCTTCTCCTGGCGCTCGCGTGCGAGAGGGAACTAGCGAGAACGAGGAAGCAGCTGGAGGTGACGCCGGGCAGATTACGCCTGTCAGGGCCGAGCCGAGCGGATCGCTGGGCGCTGTGCAGAGGAAAGGCGGGAGTGCCCGGCTCGCTGTCGCAGAGCCGAGCCTGTTTCTGCGCCGGACCAGTCGAGGACTCTGGACAGTAGAGGCCCCGGGACGACCGAGCTGATGGCGTCTTCGACCCCATCTTCGTCCGCAACCTCCTCGAACGCGGGAGCGGACCCCAATACCACTAACCTGCGCCCCACAACGTACGATACCTGGTGCGGCGTGGCCCATGGATGCACCAGAAAACTGGGGCTCAAGATCTGCGGCTTCTTGCAAAGGACCAACAGCCTGGAAGAGAAGAGTCGCCTTGTGAGTGCCTTCAAGGAGAGGCAATCCTCCAAGAACCTGCTTTCCTGTGAAAACAGCGACCGGGATGCCCGCTTCCGGCGCACAGAGACTGACTTCTCTAATCTGTTTGCTAGAGATCTGCTTCCGGCTAAGAACGGTGAGGAGCAAACCGTGCAATTCCTCCTGGAAGTGGTGGACATACTCCTCAACTATGTCCGCAAGACATTTGATCGCTCCACCAAGGTGCTGGACTTTCATCACCCACACCAGTTGCTGGAAGGCATGGAGGGCTTCAACTTGGAGCTCTCTGACCACCCCGAGTCCCTGGAGCAGATCCTGGTTGACTGCAGAGACACCTTGAAGTATGGGGTTCGCACAGGTCATCCTCGATTTTTCAACCAGCTCTCCACTGGATTGGATATTATTGGCCTAGCTGGAGAATGGCTGACATCAACGGCCAATACCAACATGTTTACATATGAAATTGCACCAGTGTTTGTCCTCATGGAACAAATAACACTTAAGAAGATGAGAGAGATAGTTGGATGGTCAAGTAAAGATGGTGATGGGATATTTTCTCCTGGGGGCGCCATATCCAACATGTACAGCATCATGGCTGCTCGCTACAAGTACTTCCCGGAAGTTAAGACAAAGGGCATGGCGGCTGTGCCTAAACTGGTCCTCTTCACCTCAGAACAGAGTCACTATTCCATAAAGAAAGCTGGGGCTGCACTTGGCTTTGGAACTGACAATGTGATTTTGATAAAGTGCAATGAAAGGGGGAAAATAATTCCAGCTGATTTTGAGGCAAAAATTCTTGAAGCCAAACAGAAGGGATATGTTCCCTTTTATGTCAATGCAACTGCTGGCACGACTGTTTATGGAGCTTTTGATCCGATACAAGAGATTGCAGATATATGTGAGAAATATAACCTTTGGTTGCATGTCGATGCTGCCTGGGGAGGTGGGCTGCTCATGTCCAGGAAGCACCGCCATAAACTCAACGGCATAGAAAGGGCCAACTCAGTCACCTGGAACCCTCACAAGATGATGGGCGTGCTGTTGCAGTGCTCTGCCATTCTCGTCAAGGAAAAGGGTATACTCCAAGGATGCAACCAGATGTGTGCAGGATACCTCTTCCAGCCAGACAAGCAGTATGATGTCTCCTACGACACCGGGGACAAGGCAATTCAGTGTGGCCGCCACGTGGATATCTTCAAGTTCTGGCTGATGTGGAAAGCAAAGGGCACAGTGGGATTTGAAAACCAGATCAACAAATGCCTGGAACTGGCTGAATACCTCTATGCCAAGATTAAAAACAGAGAAGAATTTGAGATGGTTTTCAATGGCGAGCCTGAGCACACAAACGTCTGTTTTTGGTATATTCCACAAAGCCTCAGGGGTGTGCCAGACAGCCCTCAACGACGGGAAAAGCTACACAAGGTGGCTCCAAAAATCAAAGCCCTGATGATGGAGTCAGGTACGACCATGGTTGGCTACCAGCCCCAAGGGGACAAGGCCAACTTCTTCCGGATGGTCATCTCCAACCCAGCCGCTACCCAGTCTGACATTGACTTCCTCATTGAGGAGATAGAAAGACTGGGCCAGGATCTGTAATCATCCTTCGCAGAACATGAGTTTATGGGAATGCCTTTTCCCTCTGGCACTCCAGAACAAACCTCTATATGTTGCTGAAACACACAGGCCATTTCATTGAGGGAAAACATAATATCTTGAAGAATATTGTTAAAACCTTACTTAAAGCTTGTTTGTTCTAGTTAGCAGGAAATAGTGTTCTTTTTAAAAAGTTGCACATTAGGAACAGAGTATATATGTACAGTTATACATACCTCTCTCTATATATACATGTATAGTGAGTGTGGCTTAGTAATAGATCACGGCATGTTTCCCGCTCCAAGAGAATTCACTTTACCTTCAGCAGTTACCGAGGAGCTAAACATGCTGCCAACCAGCTTGTCCAACAACTCCAGGAAAACTGTTTTTCAAAACGCCATGTCCTAGGGGCCAAGGGAAATGCTGTTGGTGAGAATCGACCTCACTGTCAGCGTTTCTCCACCTGAAGTGATGATGGATGAGAAAAAACACCACCAAATGACAAGTCACACCCTCCCCATTAGTATCCTGTTAGGGGAAAATAGTAGCAGAGTCATTGTTACAGGTGTACTATGGCTGTATTTTTAGAGATTAATTTGTGTAGATTGTGTAAATTCCTGTTGTCTGACCTTGGTGGTGGGAGGGGGAGACTATGTGTCATGATTTCAATGATTGTTTAATTGTAGGTCAATGAAATATTTGCTTATTTATATTCAGAGATGTACCATGTTAAAGAGGCGTCTTGTATTTTCTTCCCATTTGTAATGTATCTTATTTATATATGAAGTAAGTTCTGAAAACTGTTTATGGTATTTTCGTGCATTTGTGAGCCAAAGAGAAAAGATTAAAATTAGTGAGATTTGTATTTATATTAGAGTGCCCTTAAAATAATGATTTAAGCATTTTACTGTCTGTAAGAGAATTCTAAGATTGTACATAAAGTCATATATATGGAAATCCTGTTACTTAAATAGCATCTGCTCTTCTCTTACGCTCTCTGTCTGGCTGTACGTCTGGTGTTCTCAATGCTTTTCTAGCAACTGTTGGATAATAACTAGATCTCCTGTAATTTTGTAGTAGTTGATGACCAATCTCTGTGACTCGCTTAGCTGAAACCTAAGGCAACATTTCCGAAGACCTTCTGAAGATCTCAGATAAAGTGACCAGGCTCACAACTGTTTTTGAAGAAGGGAAATTCACACTGTGCGTTTTAGAGTATGCAAGAAGAATATAAATAAATAAAAATATTCTCCATGGAGAATTTGAACAAAAAAAAAAAAAAAA

SEQ ID NO: 53 - protein, 594 aa, Homo sapiens
MASSTPSSSATSSNAGADPNTTNLRPTTYDTWCGVAHGCTRKLGLKICGFLQRTNSLEEKSRLVSAFKERQSSKNLLSCENSDRDARFRRTETDFSNLFARDLLPAKNGEEQTVQFLLEVVDILLNYVRKTFDRSTKVLDFHHPHQLLEGMEGFNLELSDHPESLEQILVDCRDTLKYGVRTGHPRFFNQLSTGLDIIGLAGEWLTSTANTNMFTYEIAPVFVLMEQITLKKMREIVGWSSKDGDGIFSPGGAISNMYSIMAARYKYFPEVKTKGMAAVPKLVLFTSEQSHYSIKKAGAALGFGTDNVILIKCNERGKIIPADFEAKILEAKQKGYVPFYVNATAGTTVYGAFDPIQEIADICEKYNLWLHVDAAWGGGLLMSRKHRHKLNGIERANSVTWNPHKMMGVLLQCSAILVKEKGILQGCNQMCAGYLFQPDKQYDVSYDTGDKAIQCGRHVDIFKFWLMWKAKGTVGFENQINKCLELAEYLYAKIKNREEFEMVFNGEPEHTNVCFWYIPQSLRGVPDSPQRREKLHKVAPKIKALMMESGTTMVGYQPQGDKANFFRMVISNPAATQSDIDFLIEEIERLGQDL

SEQ ID NO: 54 - protein, 224 aa, Homo sapiens
MASLSRPSLPSCLCSFLLLLLLQVSSSYAGQFRVIGPRHPIRALVGDEVELPCRISPGKNATGMEVGWYRPPFSRVVHLYRNGKDQDGDQAPEYRGRTELLKDAIGEGKVTLRIRNVRFSDEGGFTCFFRDHSYQEEAAMELKVEDPFYWVSPGVLVLLAVLPVLLLQITVGLIFLCLQYRLRGKLRAEIENLHRTFESFGVLGPQVKEPKKTGQFLEELRNPF

SEQ ID NO: 55 - protein, 206 aa, Homo sapiens
MASLSRPSLPSCLCSFLLLLLLQVSSSYAGQFRVIGPRHPIRALVGDEVELPCRISPGKNATGMEVGWYRPPFSRVVHLYRNGKDQDGDQAPEYRGRTELLKDAIGEGKVTLRIRNVRFSDEGGFTCFFRDHSYQEEAAMELKVEDPFYWVSPGVLVLLAVLPVLLLQITVGLIFLCLQYRLRGKLRAEIENLHRTFVFHLEALSG

SEQ ID NO: 56 - protein, 108 aa, Homo sapiens
MASLSRPSLPSCLCSFLLLLLLQVSSSYADPFYWVSPGVLVLLAVLPVLLLQITVGLIFLCLQYRLRGKLRAEIENLHRTFESFGVLGPQVKEPKKTGQFLEELRNPF

SEQ ID NO: 57 - protein, 252 aa, Homo sapiens
MASLSRPSLPSCLCSFLLLLLLQVSSSYAGQFRVIGPRHPIRALVGDEVELPCRISPGKNATGMEVGWYRPPFSRVVHLYRNGKDQDGDQAPEYRGRTELLKDAIGEGKVTLRIRNVRFSDEGGFTCFFRDHSYQEEAAMELKVEDPFYWVSPGVLVLLAVLPVLLLQITVGLIFLCLQYRLRGKLRAEIENLHRTFDPHFLRVPCWKITLFVIVPVLGPLVALIICYNWLHRRLAGQFLEELLFHLEALSG

SEQ ID NO: 58 - protein, 247 aa, Homo sapiens
MASLSRPSLPSCLCSFLLLLLLQVSSSYAGQFRVIGPRHPIRALVGDEVELPCRISPGKNATGMEVGWYRPPFSRVVHLYRNGKDQDGDQAPEYRGRTELLKDAIGEGKVTLRIRNVRFSDEGGFTCFFRDHSYQEEAAMELKVEDPFYWVSPGVLVLLAVLPVLLLQITVGLIFLCLQYRLRGKLRAEIENLHRTFDPHFLRVPCWKITLFVIVPVLGPLVALIICYNWLHRRLAGQFLEELRNPF

SEQ ID NO: 59 - protein, 213 aa, Homo sapiens
MASLSRPSLPSCLCSFLLLLLLQVSSSYAGQFRVIGPRHPIRALVGDEVELPCRISPGKNATGMEVGWYRPPFSRVVHLYRNGKDQDGDQAPEYRGRTELLKDAIGEGKVTLRIRNVRFSDEGGFTCFFRDHSYQEEAAMELKVEDPFYWVSPGVLVLLAVLPVLLLQITVGLIFLCLQYRLRGKLRAEIENLHRTFGQFLEELLFHLEALSG

SEQ ID NO: 60 - protein, 229 aa, Homo sapiens
MASLSRPSLPSCLCSFLLLLLLQVSSSYAGQFRVIGPRHPIRALVGDEVELPCRISPGKNATGMEVGWYRPPFSRVVHLYRNGKDQDGDQAPEYRGRTELLKDAIGEGKVTLRIRNVRFSDEGGFTCFFRDHSYQEEAAMELKVEDPFYWVSPGVLVLLAVLPVLLLQITVGLIFLCLQYRLRGKLRAEIENLHRTFESFGVLGPQVKEPKKTGQFLEELLFHLEALSG

SEQ ID NO: 61 - protein, 208 aa, Homo sapiens
MASLSRPSLPSCLCSFLLLLLLQVSSSYAGQFRVIGPRHPIRALVGDEVELPCRISPGKNATGMEVGWYRPPFSRVVHLYRNGKDQDGDQAPEYRGRTELLKDAIGEGKVTLRIRNVRFSDEGGFTCFFRDHSYQEEAAMELKVEDPFYWVSPGVLVLLAVLPVLLLQITVGLIFLCLQYRLRGKLRAEIENLHRTFGQFLEELRNPF

SEQ ID NO: 62 - protein, 131 aa, Homo sapiens
MASLSRPSLPSCLCSFLLLLLLQVSSSYADPFYWVSPGVLVLLAVLPVLLLQITVGLIFLCLQYRLRGKLRAEIENLHRTFDPHFLRVPCWKITLFVIVPVLGPLVALIICYNWLHRRLAGQFLEELRNPF

SEQ ID NO: 63 - protein, 197 aa, Homo sapiens
MASQKRPSQRHGSKYLATASTMDHARHGFLPRHRDTGILDSIGRFFGGDRGAPKRGSGKVPWLKPGRSPLPSHARSQPGLCNMYKDSHHPARTAHYGSLPQKSHGRTQDENPVVHFFKNIVTPRTPPPSQGKGRGLSLSRFSWGAEGQRPGFGYGGRASDYKSAHKGFKGVDAQGTLSKIFKLGGRDSRSGSPMARR

SEQ ID NO: 64 - protein, 171 aa, Homo sapiens
MASQKRPSQRHGSKYLATASTMDHARHGFLPRHRDTGILDSIGRFFGGDRGAPKRGSGKDSHHPARTAHYGSLPQKSHGRTQDENPVVHFFKNIVTPRTPPPSQGKGRGLSLSRFSWGAEGQRPGFGYGGRASDYKSAHKGFKGVDAQGTLSKIFKLGGRDSRSGSPMARR

SEQ ID NO: 65 - protein, 160 aa, Homo sapiens
MASQKRPSQRHGSKYLATASTMDHARHGFLPRHRDTGILDSIGRFFGGDRGAPKRGSGKDSHHPARTAHYGSLPQKSHGRTQDENPVVHFFKNIVTPRTPPPSQGKGAEGQRPGFGYGGRASDYKSAHKGFKGVDAQGTLSKIFKLGGRDSRSGSPMARR

SEQ ID NO: 66 - protein, 197 aa, Homo sapiens
MGNHAGKRELNAEKASTNSETNRGESEKKRNLGELSRTTSEDNEVFGEADANQNNGTSSQDTAVTDSKRTADPKNAWQDAHPADPGSRPHLIRLFSRDAPGREDNTFKDRPSESDELQTIQEDSAATSESLDVMASQKRPSQRHGSKYLATASTMDHARHGFLPRHRDTGILDSIGRFFGGDRGAPKRGSGKVSSEE

SEQ ID NO: 67 - protein, 304 aa, Homo sapiens
MGNHAGKRELNAEKASTNSETNRGESEKKRNLGELSRTTSEDNEVFGEADANQNNGTSSQDTAVTDSKRTADPKNAWQDAHPADPGSRPHLIRLFSRDAPGREDNTFKDRPSESDELQTIQEDSAATSESLDVMASQKRPSQRHGSKYLATASTMDHARHGFLPRHRDTGILDSIGRFFGGDRGAPKRGSGKDSHHPARTAHYGSLPQKSHGRTQDENPVVHFFKNIVTPRTPPPSQGKGRGLSLSRFSWGAEGQRPGFGYGGRASDYKSAHKGFKGVDAQGTLSKIFKLGGRDSRSGSPMARR

SEQ ID NO: 68 - protein, 186 aa, Homo sapiens
MASQKRPSQRHGSKYLATASTMDHARHGFLPRHRDTGILDSIGRFFGGDRGAPKRGSGKVPWLKPGRSPLPSHARSQPGLCNMYKDSHHPARTAHYGSLPQKSHGRTQDENPVVHFFKNIVTPRTPPPSQGKGAEGQRPGFGYGGRASDYKSAHKGFKGVDAQGTLSKIFKLGGRDSRSGSPMARR

SEQ ID NO: 69 - protein, 277 aa, Homo sapiens
MGLLECCARCLVGAPFASLVATGLCFFGVALFCGCGHEALTGTEKLIETYFSKNYQDYEYLINVIHAFQYVIYGTASFFFLYGALLLAEGFYTTGAVRQIFGDYKTTICGKGLSATVTGGQKGRGSRGQHQAHSLERVCHCLGKWLGHPDKFVGITYALTVVWLLVFACSAVPVYIYFNTWTTCQSIAFPSKTSASIGSLCADARMYGVLPWNAFPGKVCGSNLLSICKTAEFQMTFHLFIAAFVGAAATLVSLLTFMIAATYNFAVLKLMGRGTKF

SEQ ID NO: 70 - protein, 277 aa, Homo sapiens; identical to SEQ ID NO: 69

SEQ ID NO: 71 - protein, 242 aa, Homo sapiens
MGLLECCARCLVGAPFASLVATGLCFFGVALFCGCGHEALTGTEKLIETYFSKNYQDYEYLINVIHAFQYVIYGTASFFFLYGALLLAEGFYTTGAVRQIFGDYKTTICGKGLSATFVGITYALTVVWLLVFACSAVPVYIYFNTWTTCQSIAFPSKTSASIGSLCADARMYGVLPWNAFPGKVCGSNLLSICKTAEFQMTFHLFIAAFVGAAATLVSLLTFMIAATYNFAVLKLMGRGTKF

SEQ ID NO: 72 - protein, 403 aa, Homo sapiens
MQEFFGLKVTGKPDAETLKVMKQPRCGVPDVAQFVLTEGNPRWEQTHLTYRIENYTPDLPRADVDHAIEKAFQLWSNVTPLTFTKVSEGQADIMISFVRGDHRDNSPFDGPGGNLAHAFQPGPGIGGDAHFDEDERWTNNFREYNLHRVAAHELGHSLGLSHSTDIGALMYPSYTFSGDVQLAQDDIDGIQAIYGRSQNPVQPIGPQTPKACDSKLTFDAITTIRGEVMFFKDRFYMRTNPFYPEVELNFISVFWPQLPNGLEAAYEFADRDEVRFFKGNKYWAVQGQNVLHGYPKDIYSSFGFPRTVKHIDAALSEENTGKTYFFVANKYWRYDEYKRSMDPGYPKMIAHDFPGIGHKVDAVFMKDGFFYFFHGTRQYKFDPKTKRILTLQKANSWFNCRKN

SEQ ID NO: 73 - protein, 469 aa, Homo sapiens
MHSFPPLLLLLFWGVVSHSFPATLETQEQDVDLVQKYLEKYYNLKNDGRQVEKRRNSGPVVEKLKQMQEFFGLKVTGKPDAETLKVMKQPRCGVPDVAQFVLTEGNPRWEQTHLTYRIENYTPDLPRADVDHAIEKAFQLWSNVTPLTFTKVSEGQADIMISFVRGDHRDNSPFDGPGGNLAHAFQPGPGIGGDAHFDEDERWTNNFREYNLHRVAAHELGHSLGLSHSTDIGALMYPSYTFSGDVQLAQDDIDGIQAIYGRSQNPVQPIGPQTPKACDSKLTFDAITTIRGEVMFFKDRFYMRTNPFYPEVELNFISVFWPQLPNGLEAAYEFADRDEVRFFKGNKYWAVQGQNVLHGYPKDIYSSFGFPRTVKHIDAALSEENTGKTYFFVANKYWRYDEYKRSMDPGYPKMIAHDFPGIGHKVDAVFMKDGFFYFFHGTRQYKFDPKTKRILTLQKANSWFNCRKN

SEQ ID NO: 74 - protein, 2431 aa, Homo sapiens
MTTLLWVFVTLRVITAAVTVETSDHDNSLSVSIPQPSPLRVLLGTSLTIPCYFIDPMHPVTTAPSTAPLAPRIKWSRVSKEKEVVLLVATEGRVRVNSAYQDKVSLPNYPAIPSDATLEVQSLRSNDSGVYRCEVMHGIEDSEATLEVVVKGIVFHYRAISTRYTLDFDRAQRACLQNSAIIATPEQLQAAYEDGFHQCDAGWLADQTVRYPIHTPREGCYGDKDEFPGVRTYGIRDTNETYDVYCFAEEMEGEVFYATSPEKFTFQEAANECRRLGARLATTGQLYLAWQAGMDMCSAGWLADRSVRYPISKARPNCGGNLLGVRTVYVHANQTGYPDPSSRYDAICYTGEDFVDIPENFFGVGGEEDITVQTVTWPDMELPLPRNITEGEARGSVILTVKPIFEVSPSPLEPEEPFTFAPEIGATAFAEVENETGEATRPWGFPTPGLGPATAFTSEDLVVQVTAVPGQPHLPGGVVFHYRPGPTRYSLTFEEAQQACLRTGAVIASPEQLQAAYEAGYEQCDAGWLRDQTVRYPIVSPRTPCVGDKDSSPGVRTYGVRPSTETYDVYCFVDRLEGEVFFATRLEQFTFQEALEFCESHNATLATTGQLYAAWSRGLDKCYAGWLADGSLRYPIVTPRPACGGDKPGVRTVYLYPNQTGLPDPLSRHHAFCFRGISAVPSPGEEEGGTPTSPSGVEEWIVTQVVPGVAAVPVEEETTAVPSGETTAILEFTTEPENQTEWEPAYTPVGTSPLPGILPTWPPTGAATEESTEGPSATEVPSASEEPSPSEVPFPSEEPSPSEEPFPSVRPFPSVELFPSEEPFPSKEPSPSEEPSASEEPYTPSPPVPSWTELPSSGEESGAPDVSGDFTGSGDVSGHLDFSGQLSGDRASGLPSGDLDSSGLTSTVGSGLPVESGLPSGDEERIEWPSTPTVGELPSGAEILEGSASGVGDLSGLPSGEVLETSASGVGDLSGLPSGEVLETTAPGVEDISGLPSGEVLETTAPGVEDISGLPSGEVLETTAPGVEDISGLPSGEVLETTAPGVEDISGLPSGEVLETTAPGVEDISGLPSGEVLETTAPGVEDISGLPSGEVLETAAPGVEDISGLPSGEVLETAAPGVEDISGLPSGEVLETAAPGVEDISGLPSGEVLETAAPGVEDISGLPSGEVLETAAPGVEDISGLPSGEVLETAAPGVEDISGLPSGEVLETAAPGVEDISGLPSGEVLETAAPGVEDISGLPSGEVLETAAPGVEDISGLPSGEVLETAAPGVEDISGLPSGEVLETAAPGVEDISGLPSGEVLETAAPGVEDISGLPSGEVLETAAPGVEDISGLPSGEVLETAAPGVEDISGLPSGEVLETAAPGVEDISGLPSGEVLETAAPGVEDISGLPSGEVLETTAPGVEEISGLPSGEVLETTAPGVDEISGLPSGEVLETTAPGVEEISGLPSGEVLETSTSAVGDLSGLPSGGEVLEISVSGVEDISGLPSGEVVETSASGIEDVSELPSGEGLETSASGVEDLSRLPSGEEVLEISASGFGDLSGLPSGGEGLETSASEVGTDLSGLPSGREGLETSASGAEDLSGLPSGKEDLVGSASGDLDLGKLPSGTLGSGQAPETSGLPSGFSGEYSGVDLGSGPPSGLPDFSGLPSGFPTVSLVDSTLVEVVTASTASELEGRGTIGISGAGEISGLPSSELDISGRASGLPSGTELSGQASGSPDVSGEIPGLFGVSGQPSGFPDTSGETSGVTELSGLSSGQPGISGEASGVLYGTSQPFGITDLSGETSGVPDLSGQPSGLPGFSGATSGVPDLVSGTTSGSGESSGITFVDTSLVEVAPTTFKEEEGLGSVELSGLPSGEADLSGKSGMVDVSGQFSGTVDSSGFTSQTPEFSGLPSGIAEVSGESSRAEIGSSLPSGAYYGSGTPSSFPTVSLVDRTLVESVTQAPTAQEAGEGPSGILELSGAHSGAPDMSGEHSGFLDLSGLQSGLIEPSGEPPGTPYFSGDFASTTNVSGESSVAMGTSGEASGLPEVTLITSEFVEGVTEPTISQELGQRPPVTHTPQLFESSGKVSTAGDISGATPVLPGSGVEVSSVPESSSETSAYPEAGFGASAAPEASREDSGSPDLSETTSAFHEANLERSSGLGVSGSTLTFQEGEASAAPEVSGESTTTSDVGTEAPGLPSATPTASGDRTEISGDLSGHTSQLGVVISTSIPESEWTQQTQRPAETHLEIESSSLLYSGEETHTVETATSPTDASIPASPEWKRESESTAADQEVCEEGWNKYQGHCYRHFPDRETWVDAERRCREQQSHLSSIVTPEEQEFVNNNAQDYQWIGLNDRTIEGDFRWSDGHPMQFENWRPNQPDNFFAAGEDCVVMIWHEKGEWNDVPCNYHLPFTCKKGTATTYKRRLQKRSSRHPRRSRPSTAH

SEQ ID NO: 75 - protein, 2530 aa, Homo sapiens
MTTLLWVFVTLRVITAAVTVETSDHDNSLSVSIPQPSPLRVLLGTSLTIPCYFIDPMHPVTTAPSTAPLAPRIKWSRVSKEKEVVLLVATEGRVRVNSAYQDKVSLPNYPAIPSDATLEVQSLRSNDSGVYRCEVMHGIEDSEATLEVVVKGIVFHYRAISTRYTLDFDRAQRACLQNSAIIATPEQLQAAYEDGFHQCDAGWLADQTVRYPIHTPREGCYGDKDEFPGVRTYGIRDTNETYDVYCFAEEMEGEVFYATSPEKFTFQEAANECRRLGARLATTGQLYLAWQAGMDMCSAGWLADRSVRYPISKARPNCGGNLLGVRTVYVHANQTGYPDPSSRYDAICYTGEDFVDIPENFFGVGGEEDITVQTVTWPDMELPLPRNITEGEARGSVILTVKPIFEVSPSPLEPEEPFTFAPEIGATAFAEVENETGEATRPWGFPTPGLGPATAFTSEDLVVQVTAVPGQPHLPGGVVFHYRPGPTRYSLTFEEAQQACLRTGAVIASPEQLQAAYEAGYEQCDAGWLRDQTVRYPIVSPRTPCVGDKDSSPGVRTYGVRPSTETYDVYCFVDRLEGEVFFATRLEQFTFQEALEFCESHNATLATTGQLYAAWSRGLDKCYAGWLADGSLRYPIVTPRPACGGDKPGVRTVYLYPNQTGLPDPLSRHHAFCFRGISAVPSPGEEEGGTPTSPSGVEEWIVTQVVPGVAAVPVEEETTAVPSGETTAILEFTTEPENQTEWEPAYTPVGTSPLPGILPTWPPTGAATEESTEGPSATEVPSASEEPSPSEVPFPSEEPSPSEEPFPSVRPFPSVELFPSEEPFPSKEPSPSEEPSASEEPYTPSPPVPSWTELPSSGEESGAPDVSGDFTGSGDVSGHLDFSGQLSGDRASGLPSGDLDSSGLTSTVGSGLPVESGLPSGDEERIEWPSTPTVGELPSGAEILEGSASGVGDLSGLPSGEVLETSASGVGDLSGLPSGEVLETTAPGVEDISGLPSGEVLETTAPGVEDISGLPSGEVLETTAPGVEDISGLPSGEVLETTAPGVEDISGLPSGEVLETTAPGVEDISGLPSGEVLETTAPGVEDISGLPSGEVLETAAPGVEDISGLPSGEVLETAAPGVEDISGLPSGEVLETAAPGVEDISGLPSGEVLETAAPGVEDISGLPSGEVLETAAPGVEDISGLPSGEVLETAAPGVEDISGLPSGEVLETAAPGVEDISGLPSGEVLETAAPGVEDISGLPSGEVLETAAPGVEDISGLPSGEVLETAAPGVEDISGLPSGEVLETAAPGVEDISGLPSGEVLETAAPGVEDISGLPSGEVLETAAPGVEDISGLPSGEVLETAAPGVEDISGLPSGEVLETAAPGVEDISGLPSGEVLETAAPGVEDISGLPSGEVLETTAPGVEEISGLPSGEVLETTAPGVDEISGLPSGEVLETTAPGVEEISGLPSGEVLETSTSAVGDLSGLPSGGEVLEISVSGVEDISGLPSGEVVETSASGIEDVSELPSGEGLETSASGVEDLSRLPSGEEVLEISASGFGDLSGLPSGGEGLETSASEVGTDLSGLPSGREGLETSASGAEDLSGLPSGKEDLVGSASGDLDLGKLPSGTLGSGQAPETSGLPSGFSGEYSGVDLGSGPPSGLPDFSGLPSGFPTVSLVDSTLVEVVTASTASELEGRGTIGISGAGEISGLPSSELDISGRASGLPSGTELSGQASGSPDVSGEIPGLFGVSGQPSGFPDTSGETSGVTELSGLSSGQPGISGEASGVLYGTSQPFGITDLSGETSGVPDLSGQPSGLPGFSGATSGVPDLVSGTTSGSGESSGITFVDTSLVEVAPTTFKEEEGLGSVELSGLPSGEADLSGKSGMVDVSGQFSGTVDSSGFTSQTPEFSGLPSGIAEVSGESSRAEIGSSLPSGAYYGSGTPSSFPTVSLVDRTLVESVTQAPTAQEAGEGPSGILELSGAHSGAPDMSGEHSGFLDLSGLQSGLIEPSGEPPGTPYFSGDFASTTNVSGESSVAMGTSGEASGLPEVTLITSEFVEGVTEPTISQELGQRPPVTHTPQLFESSGKVSTAGDISGATPVLPGSGVEVSSVPESSSETSAYPEAGFGASAAPEASREDSGSPDLSETTSAFHEANLERSSGLGVSGSTLTFQEGEASAAPEVSGESTTTSDVGTEAPGLPSATPTASGDRTEISGDLSGHTSQLGVVISTSIPESEWTQQTQRPAETHLEIESSSLLYSGEETHTVETATSPTDASIPASPEWKRESESTAAAPARSCAEEPCGAGTCKETEGHVICLCPPGYTGEHCNIDQEVCEEGWNKYQGHCYRHFPDRETWVDAERRCREQQSHLSSIVTPEEQEFVNNNAQDYQWIGLNDRTIEGDFRWSDGHPMQFENWRPNQPDNFFAAGEDCVVMIWHEKGEWNDVPCNYHLPFTCKKGTVACGEPPVVEHARTFGQKKDRYEINSLVRYQCTEGFVQRHMPTIRCQPSGHWEEPQITCTDPTTYKRRLQKRSSRHPRRSRPSTAH

SEQ ID NO: 76 - protein, 607 aa, Homo sapiens
MILLTFSTGRRLDFVHHSGVFFLQTLLWILCATVCGTEQYFNVEVWLQKYGYLPPTDPRMSVLRSAETMQSALAAMQQFYGINMTGKVDRNTIDWMKKPRCGVPDQTRGSSKFHIRRKRYALTGQKWQHKHITYSIKNVTPKVGDPETRKAIRRAFDVWQNVTPLTFEEVPYSELENGKRDVDITIIFASGFHGDSSPFDGEGGFLAHAYFPGPGIGGDTHFDSDEPWTLGNPNHDGNDLFLVAVHELGHALGLEHSNDPTAIMAPFYQYMETDNFKLPNDDLQGIQKIYGPPDKIPPPTRPLPTVPPHRSIPPADPRKNDRPKPPRPPTGRPSYPGAKPNICDGNFNTLAILRREMFVFKDQWFWRVRNNRVMDGYPMQITYFWRGLPPSIDAVYENSDGNFVFFKGNKYWVFKDTTLQPGYPHDLITLGSGIPPHGIDSAIWWEDVGKTYFFKGDRYWRYSEEMKTMDPGYPKPITVWKGIPESPQGAFVHKENGFTYFYKGKEYWKFNNQILKVEPGYPRSILKDFMGCDGPTDRVKEGHSPPDDVDIVIKLDNTASTVKAIAIVIPCILALCLLVLVYTVFQFKRKGTPRHILYCKRSMQEWV

SEQ ID NO: 77 - protein, 4242 aa, Homo sapiens
MMPAQYALTSSLVLLVLLSTARAGPFSSRSNVTLPAPRPPPQPGGHTVGAGVGSPSSQLYEHTVEGGEKQVVFTHRINLPPSTGCGCPPGTEPPVLASEVQALRVRLEILEELVKGLKEQCTGGCCPASAQAGTGQTDVRTLCSLHGVFDLSRCTCSCEPGWGGPTCSDPTDAEIPPSSPPSASGSCPDDCNDQGRCVRGRCVCFPGYTGPSCGWPSCPGDCQGRGRCVQGVCVCRAGFSGPDCSQRSCPRGCSQRGRCEGGRCVCDPGYTGDDCGMRSCPRGCSQRGRCENGRCVCNPGYTGEDCGVRSCPRGCSQRGRCKDGRCVCDPGYTGEDCGTRSCPWDCGEGGRCVDGRCVCWPGYTGEDCSTRTCPRDCRGRGRCEDGECICDTGYSGDDCGVRSCPGDCNQRGRCEDGRCVCWPGYTGTDCGSRACPRDCRGRGRCENGVCVCNAGYSGEDCGVRSCPGDCRGRGRCESGRCMCWPGYTGRDCGTRACPGDCRGRGRCVDGRCVCNPGFTGEDCGSRRCPGDCRGHGLCEDGVCVCDAGYSGEDCSTRSCPGGCRGRGQCLDGRCVCEDGYSGEDCGVRQCPNDCSQHGVCQDGVCICWEGYVSEDCSIRTCPSNCHGRGRCEEGRCLCDPGYTGPTCATRMCPADCRGRGRCVQGVCLCHVGYGGEDCGQEEPPASACPGGCGPRELCRAGQCVCVEGFRGPDCAIQTCPGDCRGRGECHDGSCVCKDGYAGEDCGEEVPTIEGMRMHLLEETTVRTEWTPAPGPVDAYEIQFIPTTEGASPPFTARVPSSASAYDQRGLAPGQEYQVTVRALRGTSWGLPASKTITTMIDGPQDLRVVAVTPTTLELGWLRPQAEVDRFVVSYVSAGNQRVRLEVPPEADGTLLTDLMPGVEYVVTVTAERGRAVSYPASVRANTGSSPLGLLGTTDEPPPSGPSTTQGAQAPLLQQRPQELGELRVLGRDETGRLRVVWTAQPDTFAYFQLRMRVPEGPGAHEEVLPGDVRQALVPPPPPGTPYELSLHGVPPGGKPSDPIIYQGIMDKDEEKPGKSSGPPRLGELTVTDRTSDSLLLRWTVPEGEFDSFVIQYKDRDGQPQVVPVEGPQRSAVITSLDPGRKYKFVLYGFVGKKRHGPLVAEAKILPQSDPSPGTPPHLGNLWVTDPTPDSLHLSWTVPEGQFDTFMVQYRDRDGRPQVVPVEGPERSFVVSSLDPDHKYRFTLFGIANKKRYGPLTADGTTAPERKEEPPRPEFLEQPLLGELTVTGVTPDSLRLSWTVAQGPFDSFMVQYKDAQGQPQAVPVAGDENEVTVPGLDPDRKYKMNLYGLRGRQRVGPESVVAKTAPQEDVDETPSPTELGTEAPESPEEPLLGELTVTGSSPDSLSLFWTVPQGSFDSFTVQYKDRDGRPRAVRVGGKESEVTVGGLEPGHKYKMHLYGLHEGQRVGPVSAVGVTAPQQEETPPATESPLEPRLGELTVTDVTPNSVGLSWTVPEGQFDSFIVQYKDKDGQPQVVPVAADQREVTVYNLEPERKYKMNMYGLHDGQRMGPLSVVIVTAPLPPAPATEASKPPLEPRLGELTVTDITPDSVGLSWTVPEGEFDSFVVQYKDRDGQPQVVPVAADQREVTIPDLEPSRKYKFLLFGIQDGKRRSPVSVEAKTVARGDASPGAPPRLGELWVTDPTPDSLRLSWTVPEGQFDSFVVQFKDKDGPQVVPVEGHERSVTVTPLDAGRKYRFLLYGLLGKKRHGPLTADGTTEARSAMDDTGTKRPPKPRLGEELQVTTVTQNSVGLSWTVPEGQFDSFVVQYKDRDGQPQVVPVEGSLREVSVPGLDPAHRYKLLLYGLHHGKRVGPISAVAITAGREETETETTAPTPPAPEPHLGELTVEEATSHTLHLSWMVTEGEFDSFEIQYTDRDGQLQMVRIGGDRNDITLSGLESDHRYLVTLYGFSDGKHVGPVHVEALTVPEEEKPSEPPTATPEPPIKPRLGELTVTDATPDSLSLSWTVPEGQFDHFLVQYRNGDGQPKAVRVPGHEEGVTISGLEPDHKYKMNLYGFHGGQRMGPVSVVGVTAAEEETPSPTEPSMEAPEPAEEPLLGELTVTGSSPDSLSLSWTVPQGRFDSFTVQYKDRDGRPQVVRVGGEESEVTVGGLEPGRKYKMHLYGLHEGRRVGPVSAVGVTAPEEESPDAPLAKLRLGQMTVRDITSDSLSLSWTVPEGQFDHFLVQFKNGDGQPKAVRVPGHEDGVTISGLEPDHKYKMNLYGFHGGQRVGPVSAVGLTAPGKDEEMAPASTEPPTPEPPIKPRLEELTVTDATPDSLSLSWTVPEGQFDHFLVQYKNGDGQPKATRVPGHEDRVTISGLEPDNKYKMNLYGFHGGQRVGPVSAIGVTAAEEETPSPTEPSMEAPEPPEEPLLGELTVTGSSPDSLSLSWTVPQGRFDSFTVQYKDRDGRPQVVRVGGEESEVTVGGLEPGRKYKMHLYGLHEGRRVGPVSTVGVTAPQEDVDETPSPTEPGTEAPGPPEEPLLGELTVTGSSPDSLSLSWTVPQGRFDSFTVQYKDRDGRPQAVRVGGQESKVTVRGLEPGRKYKMHLYGLHEGRRLGPVSAVGVTEDEAETTQAVPTMTPEPPIKPRLGELTMTDATPDSLSLSWTVPEGQFDHFLVQYRNGDGQPKAVRVPGHEDGVTISGLEPDHKYKMNLYGFHGGQRVGPISVIGVTAAEEETPSPTELSTEAPEPPEEPLLGELTVTGSSPDSLSLSWTIPQGHFDSFTVQYKDRDGRPQVMRVRGEESEVTVGGLEPGRKYKMHLYGLHEGRRVGPVSTVGVTEDEAETTQAVPTTTPEPPNKPRLGELTVTDATPDSLSLSWMVPEGQFDHFLVQYRNGDGQPKVVRVPGHEDGVTISGLEPDHKYKMNLYGFHGGQRVGPISVIGVTAAEEETPAPTEPSTEAPEPPEEPLLGELTVTGSSPDSLSLSWTIPQGRFDSFTVQYKDRDGRPQVVRVRGEESEVTVGGLEPGCKYKMHLYGLHEGQRVGPVSAVGVTAPKDEAETTQAVPTMTPEPPIKPRLGELTVTDATPDSLSLSWMVPEGQFDHFLVQYRNGDGQPKAVRVPGHEDGVTISGLEPDHKYKMNLYGFHGGQRVGPVSAIGVTEEETPSPTEPSTEAPEAPEEPLLGELTVTGSSPDSLSLSWTVPQGRFDSFTVQYKDRDGQPQVVRVRGEESEVTVGGLEPGRKYKMHLYGLHEGQRVGPVSTVGITAPLPTPLPVEPRLGELAVAAVTSDSVGLSWTVAQGPFDSFLVQYRDAQGQPQAVPVSGDLRAVAVSGLDPARKYKFLLFGLQNGKRHGPVPVEARTAPDTKPSPRLGELTVTDATPDSVGLSWTVPEGEFDSFVVQYKDKDGRLQVVPVAANQREVTVQGLEPSRKYRFLLYGLSGRKRLGPISADSTTAPLEKELPPHLGELTVAEETSSSLRLSWTVAQGPFDSFVVQYRDTDGQPRAVPVAADQRTVTVEDLEPGKKYKFLLYGLLGGKRLGPVSALGMTAPEEDTPAPELAPEAPEPPEEPRLGVLTVTDTTPDSMRLSWSVAQGPFDSFVVQYEDTNGQPQALLVDGDQSKILISGLEPSTPYRFLLYGLHEGKRLGPLSAEGTTGLAPAGQTSEESRPRLSQLSVTDVTTSSLRLNWEAPPGAFDSFLLRFGVPSPSTLEPHPRPLLQRELMVPGTRHSAVLRDLRSGTLYSLTLYGLRGPHKADSIQGTARTLSPVLESPRDLQFSEIRETSAKVNWMPPPSRADSFKVSYQLADGGEPQSVQVDGQARTQKLQGLIPGARYEVTVVSVRGFEESEPLTGFLTTVPDGPTQLRALNLTEGFAVLHWKPPQNPVDTYDVQVTAPGAPPLQAETPGSAVDYPLHDLVLHTNYTATVRGLRGPNLTSPASITFTTGLEAPRDLEAKEVTPRTALLTWTEPPVRPAGYLLSFHTPGGQNQEILLPGGITSHQLLGLFPSTSYNARLQAMWGQSLLPPVSTSFTTGGLRIPFPRDCGEEMQNGAGASRTSTIFLNGNRERPLNVFCDMETDGGGWLVFQRRMDGQTDFWRDWEDYAHGFGNISGEFWLGNEALHSLTQAGDYSMRVDLRAGDEAVFAQYDSFHVDSAAEYYRLHLEGYHGTAGDSMSYHSGSVFSARDRDPNSLLISCAVSYRGAWWYRNCHYANLNGLYGSTVDHQGVSWYHWKGFEFSVPFTEMKLRPRNFRSPAGGG

SEQ ID NO: 78 - protein, 673 aa, Homo sapiens
MRLSWSVAQGPFDSFVVQYEDTNGQPQALLVDGDQSKILISGLEPSTPYRFLLYGLHEGKRLGPLSAEGTTGLAPAGQTSEESRPRLSQLSVTDVTTSSLRLNWEAPPGAFDSFLLRFGVPSPSTLEPHPRPLLQRELMVPGTRHSAVLRDLRSGTLYSLTLYGLRGPHKADSIQGTARTLSPVLESPRDLQFSEIRETSAKVNWMPPPSRADSFKVSYQLADGGEPQSVQVDGQARTQKLQGLIPGARYEVTVVSVRGFEESEPLTGFLTTVPDGPTQLRALNLTEGFAVLHWKPPQNPVDTYDVQVTAPGAPPLQAETPGSAVDYPLHDLVLHTNYTATVRGLRGPNLTSPASITFTTGLEAPRDLEAKEVTPRTALLTWTEPPVRPAGYLLSFHTPGGQNQEILLPGGITSHQLLGLFPSTSYNARLQAMWGQSLLPPVSTSFTTGGLRIPFPRDCGEEMQNGAGASRTSTIFLNGNRERPLNVFCDMETDGGGWLVFQRRMDGQTDFWRDWEDYAHGFGNISGEFWLGNEALHSLTQAGDYSMRVDLRAGDEAVFAQYDSFHVDSAAEYYRLHLEGYHGTAGDSMSYHSGSVFSARDRDPNSLLISCAVSYRGAWWYRNCHYANLNGLYGSTVDHQGVSWYHWKGFEFSVPFTEMKLRPRNFRSPAGGG

SEQ ID NO: 79 - protein, 353 aa, Homo sapiens
MEKTLETVPLERKKREKEQFRKLFIGGLSFETTEESLRNYYEQWGKLTDCVVMRDPASKRSRGFGFVTFSSMAEVDAAMAARPHSIDGRVVEPKRAVAREESGKPGAHVTVKKLFVGGIKEDTEEHHLRDYFEEYGKIDTIEIITDRQSGKKRGFGFVTFDDHDPVDKIVLQKYHTINGHNAEVRKALSRQEMQEVQSSRSGRGGNFGFGDSRGGGGNFGPGPGSNFRGGSDGYGSGRGFGDGYNGYGGGPGGGNFGGSPGYGGGRGGYGGGGPGYGNQGGGYGGGYDNYGGGNYGSGNYNDFGNYNQQPSNYGPMKSGNFGGSRNMGGPYGGGNYGPGGSGGSGGYGGRSRY

SEQ ID NO: 80 - protein, 313 aa, Homo sapiens
MEKTLETVPLERKKREKEQFRKLFIGGLSFETTEESLRNYYEQWGKLTDCVVMRDPASKRSRGFGFVTFSSMAEVDAAMAARPHSIDGRVVEPKRAVAREESGKPGAHVTVKKLFVGGIKEDTEEHHLRDYFEEYGKIDTIEIITDRQSGKKRGFGFVTFDDHDPVDKIVLQKYHTINGHNAEVRKALSRQEMQEVQSSRSGRGGNFGFGDSRGGGGNFGPGPGSNFRGGSDGYGSGRGFGDGYNGYGGGPGGNYGSGNYNDFGNYNQQPSNYGPMKSGNFGGSRNMGGPYGGGNYGPGGSGGSGGYGGRSRY

SEQ ID NO: 81 - protein, 1487 aa, Homo sapiens
MIRLGAPQTLVLLTLLVAAVLRCQGQDVQEAGSCVQDGQRYNDKDVWKPEPCRICVCDTGTVLCDDIICEDVKDCLSPEIPFGECCPICPTDLATASGQPGPKGQKGEPGDIKDIVGPKGPPGPQGPAGEQGPRGDRGDKGEKGAPGPRGRDGEPGTPGNPGPPGPPGPPGPPGLGGNFAAQMAGGFDEKAGGAQLGVMQGPMGPMGPRGPPGPAGAPGPQGFQGNPGEPGEPGVSGPMGPRGPPGPPGKPGDDGEAGKPGKAGERGPPGPQGARGFPGTPGLPGVKGHRGYPGLDGAKGEAGAPGVKGESGSPGENGSPGPMGPRGLPGERGRTGPAGAAGARGNDGQPGPAGPPGPVGPAGGPGFPGAPGAKGEAGPTGARGPEGAQGPRGEPGTPGSPGPAGASGNPGTDGIPGAKGSAGAPGIAGAPGFPGPRGPPGPQGATGPLGPKGQTGEPGIAGFKGEQGPKGEPGPAGPQGAPGPAGEEGKRGARGEPGGVGPIGPPGERGAPGNRGFPGQDGLAGPKGAPGERGPSGLAGPKGANGDPGRPGEPGLPGARGLTGRPGDAGPQGKVGPSGAPGEDGRPGPPGPQGARGQPGVMGFPGPKGANGEPGKAGEKGLPGAPGLRGLPGKDGETGAAGPPGPAGPAGERGEQGAPGPSGFQGLPGPPGPPGEGGKPGDQGVPGEAGAPGLVGPRGERGFPGERGSPGAQGLQGPRGLPGTPGTDGPKGASGPAGPPGAQGPPGLQGMPGERGAAGIAGPKGDRGDVGEKGPEGAPGKDGGRGLTGPIGPPGPAGANGEKGEVGPPGPAGSAGARGAPGERGETGPPGPAGFAGPPGADGQPGAKGEQGEAGQKGDAGAPGPQGPSGAPGPQGPTGVTGPKGARGAQGPPGATGFPGAAGRVGPPGSNGNPGPPGPPGPSGKDGPKGARGDSGPPGRAGEPGLQGPAGPPGEKGEPGDDGPSGAEGPPGPQGLAGQRGIVGLPGQRGERGFPGLPGPSGEPGKQGAPGASGDRGPPGPVGPPGLTGPAGEPGREGSPGADGPPGRDGAAGVKGDRGETGAVGAPGAPGPPGSPGPAGPTGKQGDRGEAGAQGPMGPSGPAGARGIQGPQGPRGDKGEAGEPGERGLKGHRGFTGLQGLPGPPGPSGDQGASGPAGPSGPRGPPGPVGPSGKDGANGIPGPIGPPGPRGRSGETGPAGPPGNPGPPGPPGPPGPGIDMSAFAGLGPREKGPDPLQYMRADQAAGGLRQHDAEVDATLKSLNNQIESIRSPEGSRKNPARTCRDLKLCHPEWKSGDYWIDPNQGCTLDAMKVFCNMETGETCVYPNPANVPKKNWWSSKSKEKKHIWFGETINGGFHFSYGDDNLAPNTANVQMTFLRLLSTEGSQNITYHCKNSIAYLDEAAGNLKKALLIQGSNDVEIRAEGNSRFTYTALKDGCTKHTGKWGKTVIEYRSQKTSRLPIIDIAPMDIGGPEQEFGVDIGPVCFL

SEQ ID NO: 82 - protein, 279 aa, Aegilops tauschii
MKTFLILALLAIVATTATTAVRVPVPQLQPQNPSQQQPQEQVPLVQQQQFLGQQQPFPPQQPYPQPQPFPSQQPYLQLQPFPQPQLPYSQPQPFRPQQPYPQPQPQYSQPQEPISQQQQQQQQQQQILQQILQQQLIPCMDVVLQQHNIAHGRSQVLQQSTYQLLQELCCQHLWQIPEQSQCQAIQNVVHAIILHQQQKQQQQPSSQVSFQQPLQQYPLGQGSFRPSQQNPQDQGSVQPQQLPQFEEIRNLALQTLPAMCNVYIPPYCTIAPFGIFGTN

SEQ ID NO: 83 - protein, 280 aa, Aegilops tauschii
MKTFLILALLAIVATTATIAVRVPVPQLQPQNPSQQQPQEQVPLVQQQQFPGQQQPFPPQQPYPQPQPFPSQQPYLQLQPFPQPQLPYPQPQPFRPQQPYPQPQPQYSQPQQPISQQQQQQQQQQQQQQQILQQILQQQLIPCRDVVLQQHNVAHGSSQVLQQSTYQLVQQLCCQQLWQIPEQSRCQAIHNVVHAIILHQQQQQPLSQVSFQQPQQQYPSGQGSFQPSQQNPQAQGSVQPQQLPQFEEIRNLALETLPAMCNVYIPPYCTIAPGGIFGTN

SEQ ID NO: 84 - protein, 201 aa, Aegilops tauschii
PHQPFSQQPQQTFPQPQQTFPHQPQQQFPQPQQPQQQFLQPQQPFPQQPQQPYPQQPQQPFPQTQQPQQLFPQSQQPQQQFSQPQQQFPQPQQPQQSFPQQQPPFIQPSLQQQVNPCKNFLLQQCKPVSLVSSLWSMIWPQSDCQVMRQQCCQQLAQIPQQLQCAAIHTVIHSIIMQQEQQEQQQGMHILLPLYQQQQVGQ

SEQ ID NO: 85 - protein, 157 aa, Homo sapiens
MEIPVPVQPSWLRRASAPLPGLSAPGRLFDQRFGEGLLEAELAALCPTTLAPYYLRAPSVALPVPTDPGHFSVLLDVKHFSPEEIAVKVVGEHVEVHARHEERPDEHGFVAREFHRRYRLPPGVDPAAVTSALSPEGVLSIQAAPASAQAPPPAAAK

SEQ ID NO: 86 - protein, 163 aa, Homo sapiens
MKWKALFTAAILQAQLPITEAQSFGLLDPKLCYLLDGILFIYGVILTALFLRVKFSRSADAPAYQQGQNQLYNELNLGRREEYDVLDKRRGRDPEMGGKPRRKNPQEGLYNELQKDKMAEAYSEIGMKGERRRGKGHDGLYQGLSTATKDTYDALHMQALPPR

SEQ ID NO: 87 - protein, 164 aa, Homo sapiens
MKWKALFTAAILQAQLPITEAQSFGLLDPKLCYLLDGILFIYGVILTALFLRVKFSRSADAPAYQQGQNQLYNELNLGRREEYDVLDKRRGRDPEMGGKPQRRKNPQEGLYNELQKDKMAEAYSEIGMKGERRRGKGHDGLYQGLSTATKDTYDALHMQALPPR

SEQ ID NO: 88 - protein, 123 aa, Homo sapiens
MLRLLLALNLFPSIQVTGNKILVKQSPMLVAYDNAVNLSWKHLCPSPLFPGPSKPFWVLVVVGGVLACYSLLVTVAFIIFWVRSKRSRLLHSDYMNMTPRRPGPTRKHYQPYAPPRDFAAYRS

SEQ ID NO: 89 - protein, 101 aa, Homo sapiens
MLRLLLALNLFPSIQVTGKHLCPSPLFPGPSKPFWVLVVVGGVLACYSLLVTVAFIIFWVRSKRSRLLHSDYMNMTPRRPGPTRKHYQPYAPPRDFAAYRS

SEQ ID NO: 90 - protein, 220 aa, Homo sapiens
MLRLLLALNLFPSIQVTGNKILVKQSPMLVAYDNAVNLSCKYSYNLFSREFRASLHKGLDSAVEVCVVYGNYSQQLQVYSKTGFNCDGKLGNESVTFYLQNLYVNQTDIYFCKIEVMYPPPYLDNEKSNGTIIHVKGKHLCPSPLFPGPSKPFWVLVVVGGVLACYSLLVTVAFIIFWVRSKRSRLLHSDYMNMTPRRPGPTRKHYQPYAPPRDFAAYRS

SEQ ID NO: 91 - protein, 255 aa, Homo sapiens
MGNSCYNIVATLLLVLNFERTRSLQDPCSNCPAGTFCDNNRNQICSPCPPNSFSSAGGQRTCDICRQCKGVFRTRKECSSTSNAECDCTPGFHCLGAGCSMCEQDCKQGQELTKKGCKDCCFGTFNDQKRGICRPWTNCSLDGKSVLVNGTKERDVVCGPSPADLSPGASSVTPPAPAREPGHSPQIISFFLALTSTALLFLLFFLTLRFSVVKRGRKKLLYIFKQPFMRPVQTTQEEDGCSCRFPEEEEGGCEL

SEQ ID NO: 92 - protein, 199 aa, Homo sapiens
MKSGLWYFFLFCLRIKVLTGEINGSANYEMFIFHNGGVQILCKYPDIVQQFKMQLLKGGQILCDLTKTKGSGNTVSIKSLKFCHSQLSNNSVSFFLYNLDHSHANYYFCNLSIFDPPPFKVTLTGGYLHIYESQLCCQLKFWLPIGCAAFVVVCILGCILICWLTKKKYSSSVHDPNGEYMFMRAVNTAKKSRLTDVTL

SEQ ID NO: 93 - protein, 277 aa, Homo sapiens
MCVGARRLGRGPCAALLLLGLGLSTVTGLHCVGDTYPSNDRCCHECRPGNGMVSRCSRSQNTVCRPCGPGFYNDVVSSKPCKPCTWCNLRSGSERKQLCTATQDTVCRCRAGTQPLDSYKPGVDCAPCPPGHFSPGDNQACKPWTNCTLAGKHTLQPASNSSDAICEDRDPPATQPQETQGPPARPITVQPTEAWPRTSQGPSTRPVEVPGGRAVAAILGLGLVLGLLGPLAILLALYLLRRDQRLPPDAHKPPGGGSFRTPIQEEQADAHSTLAKI

SEQ ID NO: 94 - protein, 184 aa, Homo sapiens
MAPLLPIRTLPLILILLALLSPGAADFNISSLSGLLSPALTESLLVALPPCHLTGGNATLMVRRANDSKVVTSSFVVPPCRGRRELVSVVDSGAGFTVTRLSAYQVTNLVPGTKFYISYLVKKGTATESSREIPMSTLPRRNMESIGLGMARTGGMVVITVLLSVAMFLLVLGFIIALALGSRK

SEQ ID NO: 95 - protein, 273 aa, Homo sapiens
MASAAAAEAEKGSPVVVGLLVVGNIIILLSGLSLFAETIWVTADQYRVYPLMGVSGKDDVFAGAWIAIFCGFSFFMVASFGVGAALCRRRSMVLTYLVLMLIVYIFECASCITSYTHRDYMVSNPSLITKQMLTFYSADTDQGQELTRLWDRVMIEQECCGTSGPMDWVNFTSAFRAATPEVVFPWPPLCCRRTGNFIPLNEEGCRLGHMDYLFTKAGVQWHNLSSLQRLPPGFKGFSHLSFQSSWDYRAASNTSATPSTATRGVSRGLGLPS

SEQ ID NO: 96 - protein, 258 aa, Homo sapiens
MASAAAAEAEKGSPVVVGLLVVGNIIILLSGLSLFAETIWVTADQYRVYPLMGVSGKDDVFAGAWIAIFCGFSFFMVASFGVGAALCRRRSMVLTYLVLMLIVYIFECASCITSYTHRDYMVSNPSLITKQMLTFYSADTDQGQELTRLWDRVMIEQECCGTSGPMDWVNFTSAFRAATPEVVFPWPPLCCRRTGNFIPLNEEGCRLGHMDYLFTKGCFEHIGHAIDSYTWGISWFGFAILMWTLPVMLIAMYFYTML

SEQ ID NO: 97 - protein, 245 aa, Homo sapiens [sequence omitted]

SEQ ID NO: 98 - protein, 114 aa, Homo sapiens
MAGLALQPGTALLCYSCKAQVSNEDCLQVENCTQLGEQCWTARIRAVGLLTVISKGCSLNCVDDSQDYYVGKKNITCCDTDLCNASGAHALQPAAAILALLPALGLLLWGPGQL

SEQ ID NO: 99 - protein, 386 aa, Homo sapiens
MRAAPLLLARAASLSLGFLFLLFFWLDRSVLAKELKFVTLVFRHGDRSPIDTFPTDPIKESSWPQGFGQLTQLGMEQHYELGEYIRKRYRKFLNESYKHEQVYIRSTDVDRTLMSAMTNLAALFPPEGVSIWNPILLWQPIPVHTVPLSEDQLLYLPFRNCPRFQELESETLKSEEFQKRLHPYKDFIATLGKLSGLHGQDLFGIWSKVYDPLYCESVHNFTLPSWATEDTMTKLRELSELSLLSLYGIHKQKEKSRLQGGVLVNEILNHMKRATQIPSYKKLIMYSAHDTTVSGLQMALDVYNGLLPPYASCHLTELYFEKGEYFVEMYYRNETQHEPYPLMLPGCSPSCPLERFAELVGPVIPQDWSTECMTTNSHQGTEDSTD

SEQ ID NO: 100 - protein, 353 aa, Homo sapiens
MRAAPLLLARAASLSLGFLFLLFFWLDRSVLAKELKFVTLVFRHGDRSPIDTFPTDPIKESSWPQGFGQLTQLGMEQHYELGEYIRKRYRKFLNESYKHEQVYIRSTDVDRTLMSAMTNLAALFPPEGVSIWNPILLWQPIPVHTVPLSEDQDFIATLGKLSGLHGQDLFGIWSKVYDPLYCESVHNFTLPSWATEDTMTKLRELSELSLLSLYGIHKQKEKSRLQGGVLVNEILNHMKRATQIPSYKKLIMYSAHDTTVSGLQMALDVYNGLLPPYASCHLTELYFEKGEYFVEMYYRNETQHEPYPLMLPGCSPSCPLERFAELVGPVIPQDWSTECMTTNSHQGTEDSTD

SEQ ID NO: 101 - protein, 418 aa, Homo sapiens
MRAAPLLLARAASLSLGFLFLLFFWLDRSVLAKELKFVTLVFRHGDRSPIDTFPTDPIKESSWPQGFGQLTQLGMEQHYELGEYIRKRYRKFLNESYKHEQVYIRSTDVDRTLMSAMTNLAALFPPEGVSIWNPILLWQPIPVHTVPLSEDQLLYLPFRNCPRFQELESETLKSEEFQKRLHPYKDFIATLGKLSGLHGQDLFGIWSKVYDPLYCESVHNFTLPSWATEDTMTKLRELSELSLLSLYGIHKQKEKSRLQGGVLVNEILNHMKRATQIPSYKKLIMYSAHDTTVSGLQMALDVYNGLLPPYASCHLTELYFEKGEYFVEMYYRNETQHEPYPLMLPGCSPSCPLERFAELVGPVIPQDWSTECMTTNSHQVLKVIFAVAFCLISAVLMVLLFIHIRRGLCWQRESYGNI

SEQ ID NO: 102 - protein, 335 aa, Homo sapiens
MPRPRLLAALCGALLCAPSLLVALDICSKNPCHNGGLCEEISQEVRGDVFPSYTCTCLKGYAGNHCETKCVEPLGLENGNIANSQIAASSVRVTFLGLQHWVPELARLNRAGMVNAWTPSSNDDNPWIQVNLLRRMWVTGVVTQGASRLASHEYLKAFKVAYSLNGHEFDFIHDVNKKHKEFVGNWNKNAVHVNLFETPVEAQYVRLYPTSCHTACTLRFELLGCELNGCANPLGLKNNSIPDKQITASSSYKTWGLHLFSWNPSYARLDKQGNFNAWVAGSYGNDQWLQIFPGNWDNHSHKKNLFETPILARYVRILPVAWHNRIALRLELLGC

SEQ ID NO: 103 - protein, 387 aa, Homo sapiens
MPRPRLLAALCGALLCAPSLLVALDICSKNPCHNGGLCEEISQEVRGDVFPSYTCTCLKGYAGNHCETKCVEPLGLENGNIANSQIAASSVRVTFLGLQHWVPELARLNRAGMVNAWTPSSNDDNPWIQVNLLRRMWVTGVVTQGASRLASHEYLKAFKVAYSLNGHEFDFIHDVNKKHKEFVGNWNKNAVHVNLFETPVEAQYVRLYPTSCHTACTLRFELLGCELNGCANPLGLKNNSIPDKQITASSSYKTWGLHLFSWNPSYARLDKQGNFNAWVAGSYGNDQWLQVDLGSSKEVTGIITQGARNFGSVQFVASYKVAYSNDSANWTEYQDPRTGSSKIFPGNWDNHSHKKNLFETPILARYVRILPVAWHNRIALRLELLGC

SEQ ID NO: 104 - protein, 264 aa, Homo sapiens
MTPGTQSPFFLLLLLTVLTATTAPKPATVVTGSGHASSTPGGEKETSATQRSSVPSSTEKNAFNSSLEDPSTDYYQELQRDISEMFLQIYKQGGFLGLSNIKFRPGSVVVQLTLAFREGTINVHDVETQFNQYKTEAASRYNLTISDVSVSDVPFPFSAQSGAGVPGWGIALLVLVCVLVALAIVYLIALAVCQCRRKNYGQLDIFPARDTYHPMSEYPTYHTHGRYVPPSSTDRSPYEKVSAGNGGSSLSYTNPAVAATSANL

SEQ ID NO: 105 - protein, 203 aa, Homo sapiens
MTPGTQSPFFLLLLLTVLTVVTGSGHASSTPGGEKETSATQRSSVPSSTEKNAIPAPTTTKSCRETFLKCFCRFINKGVFWASPILSSVSDVPFPFSAQSGAGVPGWGIALLVLVCVLVALAIVYLIALAVCQCRRKNYGQLDIFPARDTYHPMSEYPTYHTHGRYVPPSSTDRSPYEKVSAGNGGSSLSYTNPAVAATSANL

SEQ ID NO: 106 - protein, 159 aa, Homo sapiens
MTPGTQSPFFLLLLLTVLTATTAPKPATVVTGSGHASSTPGGEKETSATQRSSVPSSTEKNAFNSSLEDPSTDYYQELQRDISEMAVCQCRRKNYGQLDIFPARDTYHPMSEYPTYHTHGRYVPPSSTDRSPYEKVSAGNGGSSLSYTNPAVAATSANL

SEQ ID NO: 107 - protein, 475 aa, Homo sapiens
MTPGTQSPFFLLLLLTVLTVVTGSGHASSTPGGEKETSATQRSSVPSSTEKNAVSMTSSVLSSHSPGSGSSTTQGQDVTLAPATEPASGSAATWGQDVTSVPVTRPALGSTTPPAHDVTSAPDNKPAPGSTAPPAHGVTSAPDTRPAPGSTAPPAHGVTSAPDNRPALGSTAPPVHNVTSASGSASGSASTLVHNGTSARATTTPASKSTPFSIPSHHSDTPTTLASHSTKTDASSTHHSTVPPLTSSNHSTSPQLSTGVSFFFLSFHISNLQFNSSLEDPSTDYYQELQRDISEMFLQIYKQGGFLGLSNIKFRPGSVVVQLTLAFREGTINVHDVETQFNQYKTEAASRYNLTISDVSVSDVPFPFSAQSGAGVPGWGIALLVLVCVLVALAIVYLIALAVCQCRRKNYGQLDIFPARDTYHPMSEYPTYHTHGRYVPPSSTDRSPYEKVSAGNGGSSLSYTNPAVAATSANL

SEQ ID NO: 108 - protein, 282 aa, Homo sapiens
MTPGTQSPFFLLLLLTVLTATTAPKPATVVTGSGHASSTPGGEKETSATQRSSVPSSTEKNALSTGVSFFFLSFHISNLQFNSSLEDPSTDYYQELQRDISEMFLQIYKQGGFLGLSNIKFRPGSVVVQLTLAFREGTINVHDVETQFNQYKTEAASRYNLTISDVSVSDVPFPFSAQSGAGVPGWGIALLVLVCVLVALAIVYLIALAVCQCRRKNYGQLDIFPARDTYHPMSEYPTYHTHGRYVPPSSTDRSPYEKVSAGNGGSSLSYTNPAVAATSANL

SEQ ID NO: 109 - protein, 238 aa, Homo sapiens
MTPGTQSPFFLLLLLTVLTATTAPKPATVVTGSGHASSTPGGEKETSATQRSSVPSSTEKNAIYKQGGFLGLSNIKFRPGSVVVQLTLAFREGTINVHDVETQFNQYKTEAASRYNLTISDVSVSDVPFPFSAQSGAGVPGWGIALLVLVCVLVALAIVYLIALAVCQCRRKNYGQLDIFPARDTYHPMSEYPTYHTHGRYVPPSSTDRSPYEKVSAGNGGSSLSYTNPAVAATSANL

SEQ ID NO: 110 - protein, 241 aa, Homo sapiens
MTPGTQSPFFLLLLLTVLTATTAPKPATVVTGSGHASSTPGGEKETSATQRSSVPSSTEKNAFLQIYKQGGFLGLSNIKFRPGSVVVQLTLAFREGTINVHDVETQFNQYKTEAASRYNLTISDVSVSDVPFPFSAQSGAGVPGWGIALLVLVCVLVALAIVYLIALAVCQCRRKNYGQLDIFPARDTYHPMSEYPTYHTHGRYVPPSSTDRSPYEKVSAGNGGSSLSYTNPAVAATSANL

SEQ ID NO: 111 - protein, 198 aa, Homo sapiens
MTPGTQSPFFLLLLLTVLTVVTGSGHASSTPGGEKETSATQRSSVPSSTEKNALSTGVSFFFLSFHISNLQFNSSLEDPSTDYYQELQRDISEMFLQIYKQGGFLGLSNIKFRPGSVVVQLTLAFREGTINVHDVETQFNQYKTEAASRYNLTISDVSGCLSVPPKELRAAGHLSSPGYLPSYERVPHLPHPWALCAP

SEQ ID NO: 112 - protein, 189 aa, Homo sapiens
MTPGTQSPFFLLLLLTVLTATTAPKPATVVTGSGHASSTPGGEKETSATQRSSVPSSTEKNAFNSSLEDPSTDYYQELQRDISEMSGAGVPGWGIALLVLVCVLVALAIVYLIALAVCQCRRKNYGQLDIFPARDTYHPMSEYPTYHTHGRYVPPSSTDRSPYEKVSAGNGGSSLSYTNPAVAATSANL

SEQ ID NO: 113 - protein, 177 aa, Homo sapiens
MTPGTQSPFFLLLLLTVLTATTAPKPATVVTGSGHASSTPGGEKETSATQRSSVPSSTEKNALSTGVSFFFLSFHISNLQFNSSLEDPSTDYYQELQRDISEMAVCQCRRKNYGQLDIFPARDTYHPMSEYPTYHTHGRYVPPSSTDRSPYEKVSAGNGGSSLSYTNPAVAATSANL

SEQ ID NO: 114 - protein, 255 aa, Homo sapiens
MTPGTQSPFFLLLLLTVLTVVTGSGHASSTPGGEKETSATQRSSVPSSTEKNAFNSSLEDPSTDYYQELQRDISEMFLQIYKQGGFLGLSNIKFRPGSVVVQLTLAFREGTINVHDVETQFNQYKTEAASRYNLTISDVSVSDVPFPFSAQSGAGVPGWGIALLVLVCVLVALAIVYLIALAVCQCRRKNYGQLDIFPARDTYHPMSEYPTYHTHGRYVPPSSTDRSPYEKVSAGNGGSSLSYTNPAVAATSANL

SEQ ID NO: 115 - protein, 150 aa, Homo sapiens
MTPGTQSPFFLLLLLTVLTVVTGSGHASSTPGGEKETSATQRSSVPSSTEKNAFNSSLEDPSTDYYQELQRDISEMAVCQCRRKNYGQLDIFPARDTYHPMSEYPTYHTHGRYVPPSSTDRSPYEKVSAGNGGSSLSYTNPAVAATSANL

SEQ ID NO: 116 - protein, 158 aa, Homo sapiens
MTPGTQSPFFLLLLLTVLTVVTGSGHASSTPGGEKETSATQRSSVPSSTEKNAIPAPTTTKSCRETFLKCFCRFINKGVFWASPILSSVWGWGARLGHRAAGAGLCSGCAGHCLSHCLGCLSVPPKELRAAGHLSSPGYLPSYERVPHLPHPWALCAP

SEQ ID NO: 117 - protein, 484 aa, Homo sapiens
MTPGTQSPFFLLLLLTVLTATTAPKPATVVTGSGHASSTPGGEKETSATQRSSVPSSTEKNAVSMTSSVLSSHSPGSGSSTTQGQDVTLAPATEPASGSAATWGQDVTSVPVTRPALGSTTPPAHDVTSAPDNKPAPGSTAPPAHGVTSAPDTRPAPGSTAPPAHGVTSAPDNRPALGSTAPPVHNVTSASGSASGSASTLVHNGTSARATTTPASKSTPFSIPSHHSDTPTTLASHSTKTDASSTHHSTVPPLTSSNHSTSPQLSTGVSFFFLSFHISNLQFNSSLEDPSTDYYQELQRDISEMFLQIYKQGGFLGLSNIKFRPGSVVVQLTLAFREGTINVHDVETQFNQYKTEAASRYNLTISDVSVSDVPFPFSAQSGAGVPGWGIALLVLVCVLVALAIVYLIALAVCQCRRKNYGQLDIFPARDTYHPMSEYPTYHTHGRYVPPSSTDRSPYEKVSAGNGGSSLSYTNPAVAATSANL

SEQ ID NO: 118 - protein, 219 aa, Homo sapiens
MTPGTQSPFFLLLLLTVLTATTAPKPATVVTGSGHASSTPGGEKETSATQRSSVPSSTEKNAFNSSLEDPSTDYYQELQRDISEMFLQIYKQGGFLGLSNIKFRPGSVVVQLTLAFREGTINVHDVETQFNQYKTEAASRYNLTISDVSVWGWGARLGHRAAGAGLCSGCAGHCLSHCLGCLSVPPKELRAAGHLSSPGYLPSYERVPHLPHPWALCAP

SEQ ID NO: 119 - protein, 217 aa, Homo sapiens
MTPGTQSPFFLLLLLTVLTGGEKETSATQRSSVPSSTEKNAIYKQGGFLGLSNIKFRPGSVVVQLTLAFREGTINVHDVETQFNQYKTEAASRYNLTISDVSVSDVPFPFSAQSGAGVPGWGIALLVLVCVLVALAIVYLIALAVCQCRRKNYGQLDIFPARDTYHPMSEYPTYHTHGRYVPPSSTDRSPYEKVSAGNGGSSLSYTNPAVAATSANL

SEQ ID NO: 120 - protein, 239 aa, Homo sapiens
MTPGTQSPFFLLLLLTVLTATTAPKPATVVTGSGHASSTPGGEKETSATQRSSVPSSTEKNAIPAPTTTKSCRETFLKWPGSVVVQLTLAFREGTINVHDVETQFNQYKTEAASRYNLTISDVSVSDVPFPFSAQSGAGVPGWGIALLVLVCVLVALAIVYLIALAVCQCRRKNYGQLDIFPARDTYHPMSEYPTYHTHGRYVPPSSTDRSPYEKVSAGNGGSSLSYTNPAVAATSANL

SEQ ID NO: 121 - protein, 230 aa, Homo sapiens
MTPGTQSPFFLLLLLTVLTVVTGSGHASSTPGGEKETSATQRSSVPSSTEKNAIPAPTTTKSCRETFLKWPGSVVVQLTLAFREGTINVHDVETQFNQYKTEAASRYNLTISDVSVSDVPFPFSAQSGAGVPGWGIALLVLVCVLVALAIVYLIALAVCQCRRKNYGQLDIFPARDTYHPMSEYPTYHTHGRYVPPSSTDRSPYEKVSAGNGGSSLSYTNPAVAATSANL

SEQ ID NO: 122 - protein, 212 aa, Homo sapiens
MTPGTQSPFFLLLLLTVLTATTAPKPATVVTGSGHASSTPGGEKETSATQRSSVPSSTEKNAIPAPTTTKSCRETFLKCFCRFINKGVFWASPILSSVSDVPFPFSAQSGAGVPGWGIALLVLVCVLVALAIVYLIALAVCQCRRKNYGQLDIFPARDTYHPMSEYPTYHTHGRYVPPSSTDRSPYEKVSAGNGGSSLSYTNPAVAATSANL

SEQ ID NO: 123 - protein, 273 aa, Homo sapiens
MTPGTQSPFFLLLLLTVLTVVTGSGHASSTPGGEKETSATQRSSVPSSTEKNALSTGVSFFFLSFHISNLQFNSSLEDPSTDYYQELQRDISEMFLQIYKQGGFLGLSNIKFRPGSVVVQLTLAFREGTINVHDVETQFNQYKTEAASRYNLTISDVSVSDVPFPFSAQSGAGVPGWGIALLVLVCVLVALAIVYLIALAVCQCRRKNYGQLDIFPARDTYHPMSEYPTYHTHGRYVPPSSTDRSPYEKVSAGNGGSSLSYTNPAVAATSANL

SEQ ID NO: 124 - protein, 575 aa, Homo sapiens
MDLVLKRCLLHLAVIGALLAVGATKGSQVWGGQPVYPQETDDACIFPDGGPCPSGSWSQKRSFVYVWKTWGQYWQVLGGPVSGLSIGTGRAMLGTHTMEVTVYHRRGSRSYVPLAHSSSAFTITDQVPFSVSVSQLRALDGGNKHFLRNQPLTFALQLHDPSGYLAEADLSYTWDFGDSSGTLISRALVVTHTYLEPGPVTAQVVLQAAIPLTSCGSSPVPGTTDGHRPTAEAPNTTAGQVPTTEVVGTTPGQAPTAEPSGTTSVQVPTTEVISTAPVQMPTAESTGMTPEKVPVSEVMGTTLAEMSTPEATGMTPAEVSIVVLSGTTAAQVTTTEWVETTARELPIPEPEGPDASSIMSTESITGSLGPLLDGTATLRLVKRQVPLDCVLYRYGSFSVTLDIVQGIESAEILQAVPSGEGDAFELTVSCQGGLPKEACMEISSPGCQPPAQRLCQPVLPSPACQLVLHQILKGGSGTYCLNVSLADTNSLAVVSTQLIMPGQEAGLGQVPLIVGILLVLMAVVLASLIYRRRLMKQDFSVPQLPHSSSHWLRLPRIFCSCPIGENSPLLSGQQV

SEQ ID NO: 125 - protein, 668 aa, Homo sapiens
MDLVLKRCLLHLAVIGALLAVGATKVPRNQDWLGVSRQLRTKAWNRQLYPEWTEAQRLDCWRGGQVSLKVSNDGPTLIGANASFSIALNFPGSQKVLPDGQVIWVNNTIINGSQVWGGQPVYPQETDDACIFPDGGPCPSGSWSQKRSFVYVWKTWGQYWQVLGGPVSGLSIGTGRAMLGTHTMEVTVYHRRGSRSYVPLAHSSSAFTITDQVPFSVSVSQLRALDGGNKHFLRNQPLTFALQLHDPSGYLAEADLSYTWDFGDSSGTLISRALVVTHTYLEPGPVTAQVVLQAAIPLTSCGSSPVPGTTDGHRPTAEAPNTTAGQVPTTEVVGTTPGQAPTAEPSGTTSVQVPTTEVISTAPVQMPTAESTGMTPEKVPVSEVMGTTLAEMSTPEATGMTPAEVSIVVLSGTTAAQVTTTEWVETTARELPIPEPEGPDASSIMSTESITGSLGPLLDGTATLRLVKRQVPLDCVLYRYGSFSVTLDIVQGIESAEILQAVPSGEGDAFELTVSCQGGLPKEACMEISSPGCQPPAQRLCQPVLPSPACQLVLHQILKGGSGTYCLNVSLADTNSLAVVSTQLIMPVPGILLTGQEAGLGQVPLIVGILLVLMAVVLASLIYRRRLMKQDFSVPQLPHSSSHWLRLPRIFCSCPIGENSPLLSGQQV

SEQ ID NO: 126 - protein, 661 aa, Homo sapiens
MDLVLKRCLLHLAVIGALLAVGATKVPRNQDWLGVSRQLRTKAWNRQLYPEWTEAQRLDCWRGGQVSLKVSNDGPTLIGANASFSIALNFPGSQKVLPDGQVIWVNNTIINGSQVWGGQPVYPQETDDACIFPDGGPCPSGSWSQKRSFVYVWKTWGQYWQVLGGPVSGLSIGTGRAMLGTHTMEVTVYHRRGSRSYVPLAHSSSAFTITDQVPFSVSVSQLRALDGGNKHFLRNQPLTFALQLHDPSGYLAEADLSYTWDFGDSSGTLISRALVVTHTYLEPGPVTAQVVLQAAIPLTSCGSSPVPGTTDGHRPTAEAPNTTAGQVPTTEVVGTTPGQAPTAEPSGTTSVQVPTTEVISTAPVQMPTAESTGMTPEKVPVSEVMGTTLAEMSTPEATGMTPAEVSIVVLSGTTAAQVTTTEWVETTARELPIPEPEGPDASSIMSTESITGSLGPLLDGTATLRLVKRQVPLDCVLYRYGSFSVTLDIVQGIESAEILQAVPSGEGDAFELTVSCQGGLPKEACMEISSPGCQPPAQRLCQPVLPSPACQLVLHQILKGGSGTYCLNVSLADTNSLAVVSTQLIMPGQEAGLGQVPLIVGILLVLMAVVLASLIYRRRLMKQDFSVPQLPHSSSHWLRLPRIFCSCPIGENSPLLSGQQV

SEQ ID NO: 127 - protein, 118 aa, Homo sapiens
MPREDAHFIYGYPKKGHGHSYTTAEEAAGIGILTVILGVLLLIGCWYCRRRNGYRALMDKSLHVGTQCALTRRCPQEGFDHRDSKVSLQEKNCEPVVPNAPPAYEKLSAEQSPPPYSP

SEQ ID NO: 128 - protein, 1069 aa, Homo sapiens
MPRAPRCRAVRSLLRSHYREVLPLATFVRRLGPQGWRLVQRGDPAAFRALVAQCLVCVPWDARPPPAAPSFRQVSCLKELVARVLQRLCERGAKNVLAFGFALLDGARGGPPEAFTTSVRSYLPNTVTDALRGSGAWGLLLRRVGDDVLVHLLARCALFVLVAPSCAYQVCGPPLYQLGAATQARPPPHASGPRRRLGCERAWNHSVREAGVPLGLPAPGARRRGGSASRSLPLPKRPRRGAAPEPERTPVGQGSWAHPGRTRGPSDRGFCVVSPARPAEEATSLEGALSGTRHSHPSVGRQHHAGPPSTSRPPRPWDTPCPPVYAETKHFLYSSGDKEQLRPSFLLSSLRPSLTGARRLVETIFLGSRPWMPGTPRRLPRLPQRYWQMRPLFLELLGNHAQCPYGVLLKTHCPLRAAVTPAAGVCAREKPQGSVAAPEEEDTDPRRLVQLLRQHSSPWQVYGFVRACLRRLVPPGLWGSRHNERRFLRNTKKFISLGKHAKLSLQELTWKMSVRDCAWLRRSPGVGCVPAAEHRLREEILAKFLHWLMSVYVVELLRSFFYVTETTFQKNRLFFYRKSVWSKLQSIGIRQHLKRVQLRELSEAEVRQHREARPALLTSRLRFIPKPDGLRPIVNMDYVVGARTFRREKRAERLTSRVKALFSVLNYERARRPGLLGASVLGLDDIHRAWRTFVLRVRAQDPPPELYFVKVDVTGAYDTIPQDRLTEVIASIIKPQNTYCVRRYAVVQKAAHGHVRKAFKSHVSTLTDLQPYMRQFVAHLQETSPLRDAVVIEQSSSLNEASSGLFDVFLRFMCHHAVRIRGKSYVQCQGIPQGSILSTLLCSLCYGDMENKLFAGIRRDGLLLRLVDDFLLVTPHLTHAKTFLSYARTSIRASLTFNRGFKAGRNMRRKLFGVLRLKCHSLFLDLQVNSLQTVCTNIYKILLLQAYRFHACVLQLPFHQQVWKNPTFFLRVISDTASLCYSILKAKNAGMSLGAKGAAGPLPSEAVQWLCHQAFLLKLTRHRVTYVPLLGSLRTAQTQLSRKLPGTTLTALEAAANPALPSDFKTILD

SEQ ID NO: 129 - protein, 1132 aa, Homo sapiens
MPRAPRCRAVRSLLRSHYREVLPLATFVRRLGPQGWRLVQRGDPAAFRALVAQCLVCVPWDARPPPAAPSFRQVSCLKELVARVLQRLCERGAKNVLAFGFALLDGARGGPPEAFTTSVRSYLPNTVTDALRGSGAWGLLLRRVGDDVLVHLLARCALFVLVAPSCAYQVCGPPLYQLGAATQARPPPHASGPRRRLGCERAWNHSVREAGVPLGLPAPGARRRGGSASRSLPLPKRPRRGAAPEPERTPVGQGSWAHPGRTRGPSDRGFCVVSPARPAEEATSLEGALSGTRHSHPSVGRQHHAGPPSTSRPPRPWDTPCPPVYAETKHFLYSSGDKEQLRPSFLLSSLRPSLTGARRLVETIFLGSRPWMPGTPRRLPRLPQRYWQMRPLFLELLGNHAQCPYGVLLKTHCPLRAAVTPAAGVCAREKPQGSVAAPEEEDTDPRRLVQLLRQHSSPWQVYGFVRACLRRLVPPGLWGSRHNERRFLRNTKKFISLGKHAKLSLQELTWKMSVRDCAWLRRSPGVGCVPAAEHRLREEILAKFLHWLMSVYVVELLRSFFYVTETTFQKNRLFFYRKSVWSKLQSIGIRQHLKRVQLRELSEAEVRQHREARPALLTSRLRFIPKPDGLRPIVNMDYVVGARTFRREKRAERLTSRVKALFSVLNYERARRPGLLGASVLGLDDIHRAWRTFVLRVRAQDPPPELYFVKVDVTGAYDTIPQDRLTEVIASIIKPQNTYCVRRYAVVQKAAHGHVRKAFKSHVSTLTDLQPYMRQFVAHLQETSPLRDAVVIEQSSSLNEASSGLFDVFLRFMCHHAVRIRGKSYVQCQGIPQGSILSTLLCSLCYGDMENKLFAGIRRDGLLLRLVDDFLLVTPHLTHAKTFLRTLVRGVPEYGCVVNLRKTVVNFPVEDEALGGTAFVQMPAHGLFPWCGLLLDTRTLEVQSDYSSYARTSIRASLTFNRGFKAGRNMRRKLFGVLRLKCHSLFLDLQVNSLQTVCTNIYKILLLQAYRFHACVLQLPFHQQVWKNPTFFLRVISDTASLCYSILKAKNAGMSLGAKGAAGPLPSEAVQWLCHQAFLLKLTRHRVTYVPLLGSLRTAQTQLSRKLPGTTLTALEAAANPALPSDFKTILD

SEQ ID NO: 130 - protein, 353 aa, Human T-lymphotropic virus 1
MAHFPGFGQSLLFGYPVYVFGDCVQGDWCPISGGLCSARLHRHALLATCPEHQITWDPIDGRVIGSALQFLIPRLPSFPTQRTSKTLKVLTPPITHTTPNIPPSFLQAMRKYSPFRNGYMEPTLGQHLPTLSFPDPGLRPQNLYTLWGGSVVCMYLYQLSPPITWPLLPHVIFCHPGQLGAFLTNVPYKRIEKLLYKISLTTGALIILPEDCLPTTLFQPARAPVTLTAWQNGLLPFHSTLTTPGLIWTFTDGTPMISGPCPKDGQPSLVLQSSSFIFHKFQTKAYHPSFLLSHGLIQYSSFHNLHLLFEEYTNIPISLLFNEKEADDNDHEPQISPGGLEPLSEKHFRETEV

SEQ ID NO: 131 - protein, 345 aa, Human T-lymphotropic virus 4
MAHFPGFGQSLLYGYPVYVFGDCVQADWCPISGGLCSPRLHRHALLATCPEHQITWDPIDGRVVGSPLQYLIPRLPSFPTQRTSKTLKVLTPPTTPVTPKVPPSFFQSVRRHSPYRNGCLETTLGEQLPSLAFPEPGLRPQNVYTIWGKTIVCLYIYQLSPPMTWPLIPHVIFCNPRQLGAFLSNVPPKRLEELLYKLYLHTGAIIILPEDALPTTLFQPVRAPCVQTTWNTGLLPYQPNLTTPGLIWTFNDGSPMISGPCPKAGQPSLVVQSSLLIFERFQTKAYHPSYLLSHQLIQYSSFHHLYLLFDEYTTIPFSLLFKEKEGDDRDNDPLPGATASPQGQN

SEQ ID NO: 132 - protein, 180 aa, Homo sapiens
MQAEGRGTGGSTGDADGPGGPGIPDGPGGNAGGPGEAGATGGRGPRGAGAARASGPGGGAPRGPHGGAASGLNGCCRCGARGPESRLLEFYLAMPFATPMEAELARRSLAQDAPPLPVPGVLLKEFTVSGNILTIRLTAADHRQLQLSISSCLQQLSLLMWITQCFLPVFLAQPPSGQRR

SEQ ID NO: 133 - protein, 309 aa, Homo sapiens
MSLEQRSLHCKPEEALEAQQEALGLVCVQAATSSSSPLVLGTLEEVPTAGSTDPPQSPQGASAFPTTINFTRQRQPSEGSSSREEEGPSTSCILESLFRAVITKKVADLVGFLLLKYRAREPVTKAEMLESVIKNYKHCFPEIFGKASESLQLVFGIDVKEADPTGHSYVLVTCLGLSYDGLLGDNQIMPKTGFLIIVLVMIAMEGGHAPEEEIWEELSVMEVYDGREHSAYGEPRKLLTQDLVQEKYLEYRQVPDSDPARYEFLWGPRALAETSYVKVLEYVIKVSARVRFFFPSLREAALREEEEGV

SEQ ID NO: 134 - protein, 314 aa, Homo sapiens
MPLEQRSQHCKPEEGLEARGEALGLVGAQAPATEEQEAASSSSTLVEVTLGEVPAAESPDPPQSPQGASSLPTTMNYPLWSQSYEDSSNQEEEGPSTFPDLESEFQAALSRKVAELVHFLLLKYRAREPVTKAEMLGSVVGNWQYFFPVIFSKASSSLQLVFGIELMEVDPIGHLYIFATCLGLSYDGLLGDNQIMPKAGLLIIVLAIIAREGDCAPEEKIWEELSVLEVFEGREDSILGDPKKLLTQHFVQENYLEYRQVPGSDPACYEFLWGPRALVETSYVKVLHHMVKISGGPHISYPPLHEWVLREGEE

SEQ ID NO: 135 - protein, 1225 aa, Homo sapiens
MKLRLPASPETHLDMLRHLYQGCQVVQGNLELTYLPTNASLSFLQDIQEVQGYVLIAHNQVRQVPLQRLRIVRGTQLFEDNYALAVLDNGDPLNNTTPVTGASPGGLRELQLRSLTEILKGGVLIQRNPQLCYQDTILWKDIFHKNNQLALTLIDTNRSRACHPCSPMCKGSRCWGESSEDCQSLTRTVCAGGCARCKGPLPTDCCHEQCAAGCTGPKHSDCLACLHFNHSGICELHCPALVTYNTDTFESMPNPEGRYTFGASCVTACPYNYLSTDVGSCTLVCPLHNQEVTAEDGTQRCEKCSKPCARVCYGLGMEHLREVRAVTSANIQEFAGCKKIFGSLAFLPESFDGDPASNTAPLQPEQLQVFETLEEITGYLYISAWPDSLPDLSVFQNLQVIRGRILHNGAYSLTLQGLGISWLGLRSLRELGSGLALIHHNTHLCFVHTVPWDQLFRNPHQALLHTANRPEDECVGEGLACHQLCARGHCWGPGPTQCVNCSQFLRGQECVEECRVLQGLPREYVNARHCLPCHPECQPQNGSVTCFGPEADQCVACAHYKDPPFCVARCPSGVKPDLSYMPIWKFPDEEGACQPCPINCTHSCVDLDDKGCPAEQRASPLTSIISAVVGILLVVVLGVVFGILIKRRQQKIRKYTMRRLLQETELVEPLTPSGAMPNQAQMRILKETELRKVKVLGSGAFGTVYKGIWIPDGENVKIPVAIKVLRENTSPKANKEILDEAYVMAGVGSPYVSRLLGICLTSTVQLVTQLMPYGCLLDHVRENRGRLGSQDLLNWCMQIAKGMSYLEDVRLVHRDLAARNVLVKSPNHVKITDFGLARLLDIDETEYHADGGKVPIKWMALESILRRRFTHQSDVWSYGVTVWELMTFGAKPYDGIPAREIPDLLEKGERLPQPPICTIDVYMIMVKCWMIDSECRPRFRELVSEFSRMARDPQRFVVIQNEDLGPASPLDSTFYRSLLEDDDMGDLVDAEEYLVPQQGFFCPDPAPGAGGMVHHRHRSSSTRSGGGDLTLGLEPSEEEAPRSPLAPSEGAGSDVFDGDLGMGAAKGLQSLPTHDPSPLQRYSEDPTVPLPSETDGYVAPLTCSPQPEYVNQPDVRPQPPSPREGPLPAARPAGATLERPKTLSPGKNGVVKDVFAFGGAVENPEYLTPQGGAAPQPHPPPAFSPAFDNLYYWDQDPPERGAPPSTFKGTPTAENPEYLGLDVPV

SEQ ID NO: 136 - protein, 1240 aa, Homo sapiens
MPRGSWKPQVCTGTDMKLRLPASPETHLDMLRHLYQGCQVVQGNLELTYLPTNASLSFLQDIQEVQGYVLIAHNQVRQVPLQRLRIVRGTQLFEDNYALAVLDNGDPLNNTTPVTGASPGGLRELQLRSLTEILKGGVLIQRNPQLCYQDTILWKDIFHKNNQLALTLIDTNRSRACHPCSPMCKGSRCWGESSEDCQSLTRTVCAGGCARCKGPLPTDCCHEQCAAGCTGPKHSDCLACLHFNHSGICELHCPALVTYNTDTFESMPNPEGRYTFGASCVTACPYNYLSTDVGSCTLVCPLHNQEVTAEDGTQRCEKCSKPCARVCYGLGMEHLREVRAVTSANIQEFAGCKKIFGSLAFLPESFDGDPASNTAPLQPEQLQVFETLEEITGYLYISAWPDSLPDLSVFQNLQVIRGRILHNGAYSLTLQGLGISWLGLRSLRELGSGLALIHHNTHLCFVHTVPWDQLFRNPHQALLHTANRPEDECVGEGLACHQLCARGHCWGPGPTQCVNCSQFLRGQECVEECRVLQGLPREYVNARHCLPCHPECQPQNGSVTCFGPEADQCVACAHYKDPPFCVARCPSGVKPDLSYMPIWKFPDEEGACQPCPINCTHSCVDLDDKGCPAEQRASPLTSIISAVVGILLVVVLGVVFGILIKRRQQKIRKYTMRRLLQETELVEPLTPSGAMPNQAQMRILKETELRKVKVLGSGAFGTVYKGIWIPDGENVKIPVAIKVLRENTSPKANKEILDEAYVMAGVGSPYVSRLLGICLTSTVQLVTQLMPYGCLLDHVRENRGRLGSQDLLNWCMQIAKGMSYLEDVRLVHRDLAARNVLVKSPNHVKITDFGLARLLDIDETEYHADGGKVPIKWMALESILRRRFTHQSDVWSYGVTVWELMTFGAKPYDGIPAREIPDLLEKGERLPQPPICTIDVYMIMVKCWMIDSECRPRFRELVSEFSRMARDPQRFVVIQNEDLGPASPLDSTFYRSLLEDDDMGDLVDAEEYLVPQQGFFCPDPAPGAGGMVHHRHRSSSTRSGGGDLTLGLEPSEEEAPRSPLAPSEGAGSDVFDGDLGMGAAKGLQSLPTHDPSPLQRYSEDPTVPLPSETDGYVAPLTCSPQPEYVNQPDVRPQPPSPREGPLPAARPAGATLERPKTLSPGKNGVVKDVFAFGGAVENPEYLTPQGGAAPQPHPPPAFSPAFDNLYYWDQDPPERGAPPSTFKGTPTAENPEYLGLDVPV

SEQ ID NO: 137 - protein, 1055 aa, Homo sapiens
MELAALCRWGLLLALLPPGAASTQVCTGTDMKLRLPASPETHLDMLRHLYQGCQVVQGNLELTYLPTNASLSFLQDIQEVQGYVLIAHNQVRQVPLQRLRIVRGTQLFEDNYALAVLDNGDPLNNTTPVTGASPGGLRELQLRSLTEILKGGVLIQRNPQLCYQDTILWKDIFHKNNQLALTLIDTNRSRACHPCSPMCKGSRCWGESSEDCQSLTRTVCAGGCARCKGPLPTDCCHEQCAAGCTGPKHSDCLACLHFNHSGICELHCPALVTYNTDTFESMPNPEGRYTFGASCVTACPYNYLSTDVGSCTLVCPLHNQEVTAEDGTQRCEKCSKPCARVCYGLGMEHLREVRAVTSANIQEFAGCKKIFGSLAFLPESFDGDPASNTAPLQPEQLQVFETLEEITGYLYISAWPDSLPDLSVFQNLQVIRGRILHNGAYSLTLQGLGISWLGLRSLRELGSGLALIHHNTHLCFVHTVPWDQLFRNPHQALLHTANRPEDECVGEGLACHQLCARGHCWGPGPTQCVNCSQFLRGQECVEECRVLQGLPREYVNARHCLPCHPECQPQNGSVTCFGPEADQCVACAHYKDPPFCVARCPSGVKPDLSYMPIWKFPDEEGACQPCPINCTHSCVDLDDKGCPAEQRASPLTSIISAVVGILLVVVLGVVFGILIKRRQQKIRKYTMRRLLQETELVEPLTPSGAMPNQAQMRILKETELRKVKVLGSGAFGTVYKGIWIPDGENVKIPVAIKVLRENTSPKANKEILDEAYVMAGVGSPYVSRLLGICLTSTVQLVTQLMPYGCLLDHVRENRGRLGSQDLLNWCMQIAKGMSYLEDVRLVHRDLAARNVLVKSPNHVKITDFGLARLLDIDETEYHADGGKVPIKWMALESILRRRFTHQSDVWSYGVTVWELMTFGAKPYDGIPAREIPDLLEKGERLPQPPICTIDVYMIMVKCWMIDSECRPRFRELVSEFSRMARDPQRFVVIQNEDLGPASPLDSTFYRSLLEDDDMGDLVDAEEYLVPQQGFFCPDPAPGAGGMVHHRHRSSSTRNM

SEQ ID NO: 138 - protein, 603 aa, Homo sapiens
MKLRLPASPETHLDMLRHLYQGCQVVQGNLELTYLPTNASLSFLQDIQEVQGYVLIAHNQVRQVPLQRLRIVRGTQLFEDNYALAVLDNGDPLNNTTPVTGASPGGLRELQLRSLTEILKGGVLIQRNPQLCYQDTILWKDIFHKNNQLALTLIDTNRSRACHPCSPMCKGSRCWGESSEDCQSLTRTVCAGGCARCKGPLPTDCCHEQCAAGCTGPKHSDCLACLHFNHSGICELHCPALVTYNTDTFESMPNPEGRYTFGASCVTACPYNYLSTDVGSCTLVCPLHNQEVTAEDGTQRCEKCSKPCARVCYGLGMEHLREVRAVTSANIQEFAGCKKIFGSLAFLPESFDGDPASNTAPLQPEQLQVFETLEEITGYLYISAWPDSLPDLSVFQNLQVIRGRILHNGAYSLTLQGLGISWLGLRSLRELGSGLALIHHNTHLCFVHTVPWDQLFRNPHQALLHTANRPEDECVGEGLACHQLCARGHCWGPGPTQCVNCSQFLRGQECVEECRVLQGLPREYVNARHCLPCHPECQPQNGSVTCFGPEADQCVACAHYKDPPFCVARCPSGVKPDLSYMPIWKFPDEEGACQPCPINCTHS

SEQ ID NO: 139 - protein, 1255 aa, Homo sapiens [sequence omitted]

SEQ ID NO: 140 - protein, 781 aa, Homo sapiens
MATQADLMELDMAMEPDRKAAVSHWQQQSYLDSGIHSGATTTAPSLSGKGNPEEEDVDTSQVLYEWEQGFSQSFTQEQVADIDGQYAMTRAQRVRAAMFPETLDEGMQIPSTQFDAAHPTNVQRLAEPSQMLKHAVVNLINYQDDAELATRAIPELTKLLNDEDQVVVNKAAVMVHQLSKKEASRHAIMRSPQMVSAIVRTMQNTNDVETARCTAGTLHNLSHHREGLLAIFKSGGIPALVKMLGSPVDSVLFYAITTLHNLLLHQEGAKMAVRLAGGLQKMVALLNKTNVKFLAITTDCLQILAYGNQESKLIILASGGPQALVNIMRTYTYEKLLWTTSRVLKVLSVCSSNKPAIVEAGGMQALGLHLTDPSQRLVQNCLWTLRNLSDAATKQEGMEGLLGTLVQLLGSDDINVVTCAAGILSNLTCNNYKNKMMVCQVGGIEALVRTVLRAGDREDITEPAICALRHLTSRHQEAEMAQNAVRLHYGLPVVVKLLHPPSHWPLIKATVGLIRNLALCPANHAPLREQGAIPRLVQLLVRAHQDTQRRTSMGGTQQQFVEGVRMEEIVEGCTGALHILARDVHNRIVIRGLNTIPLFVQLLYSPIENIQRVAAGVLCELAQDKEAAEAIEAEGATAPLTELLHSRNEGVATYAAAVLFRMSEDKPQDYKKRLSVELTSSLFRTEPMAWNETADLGLDIGAQGEPLGYRQDDPSYRSFHSGGYGQDALGMDPMMEHEMGGHHPGADYPVDGLPDLGHAQDLMDGLPPGDSNQLAWFDTDL

SEQ ID NO: 141 - protein, 781 aa, Homo sapiens; identical to SEQ ID NO: 140

SEQ ID NO: 142 - protein, 781 aa, Homo sapiens; identical to SEQ ID NO: 140

SEQ ID NO: 143 - protein, 529 aa, Homo sapiens [sequence omitted]

SEQ ID NO: 144 - protein, 693 aa, Homo sapiens
MVDPVGFAEAWKAQFPDSEPPRMELRSVGDIEQELERCKASIRRLEQEVNQERFRMIYLQTLLAKEKKSYDRQRWGFRRAAQAPDGASEPRASASRPQPAPADGADPPPAEEPEARPDGEGSPGKARPGTARRPGAAASGERDDRGPPASVAALRSNFERIRKGHGQPGADAEKPFYVNVEFHHERGLVKVNDKEVSDRISSLGSQAMQMERKKSQHGAGSSVGDASRPPYRGRSSESSCGVDGDYEDAELNPRFLKDNLIDANGGSRPPWPPLEYQPYQSIYVGGMMEGEGKGPLLRSQSTSEQEKRLTWPRRSYSPRSFEDCGGGYTPDCSSNENLTSSEEDFSSGQSSRVSPSPTTYRMFRDKSRSPSQNSQQSFDSSSPPTPQCHKRHRHCPVVVSEATIVGVRKTGQIWPNDGEGAFHGDADGSFGTPPGYGCAADRAEEQRRHQDGLPYIDDSPSSSPHLSSKGRGSRDALVSGALESTKASELDLEKGLEMRKWVLSGILASEETYLSHLEALLLPMKPLKAAATTSQPVLTSQQIETIFFKVPELYEIHKEFYDGLFPRVQQWSHQQRVGDLFQKLASQLGVYRAFVDNYGVAMEMAEKCCQANAQFAEISENLRARSNKDAKDPTTKNSLETLLYKPVDRVTRSTLVLHDLLKHTPASHPDHPLLQDALRISQNFLSSINEEIT

SEQ ID NO: 145 - protein, 464 aa, Homo sapiens
MDFSRNLYDIGEQLDSEDLASLKFLSLDYIPQRKQEPIKDALMLFQRLQEKRMLEESNLSFLKELLFRINRLDLLITYLNTRKEEMERELQTPGRAQISAYRVMLYQISEEVSRSELRSFKFLLQEEISKCKLDDDMNLLDIFIEMEKRVILGEGKLDILKRVCAQINKSLLKIINDYEEFSKGEELCGVMTISDSPREQDSESQTLDKVYQMKSKPRGYCLIINNHNFAKAREKVPKLHSIRDRNGTHLDAGALTTTFEELHFEIKPHDDCTVEQIYEILKIYQLMDHSNMDCFICCILSHGDKGIIYGTDGQEAPIYELTSQFTGLKCPSLAGKPKVFFIQACQGDNYQKGIPVETDSEEQPYLEMDLSSPQTRYIPDEADFLLGMATVNNCVSYRNPAEGTWYIQSLCQSLRERCPRGDDILTILTEVNYEVSNKDDKKNMGKQMPQPTFTLRKKLVFPSD

SEQ ID NO: 146 - protein, 538 aa, Homo sapiens
MEGGRRARVVIESKRNFFLGAFPTPFPAEHVELGRLGDSETAMVPGKGGADYILLPFKKMDFSRNLYDIGEQLDSEDLASLKFLSLDYIPQRKQEPIKDALMLFQRLQEKRMLEESNLSFLKELLFRINRLDLLITYLNTRKEEMERELQTPGRAQISAYRVMLYQISEEVSRSELRSFKFLLQEEISKCKLDDDMNLLDIFIEMEKRVILGEGKLDILKRVCAQINKSLLKIINDYEEFSKERSSSLEGSPDEFSNGEELCGVMTISDSPREQDSESQTLDKVYQMKSKPRGYCLIINNHNFAKAREKVPKLHSIRDRNGTHLDAGALTTTFEELHFEIKPHDDCTVEQIYEILKIYQLMDHSNMDCFICCILSHGDKGIIYGTDGQEAPIYELTSQFTGLKCPSLAGKPKVFFIQACQGDNYQKGIPVETDSEEQPYLEMDLSSPQTRYIPDEADFLLGMATVNNCVSYRNPAEGTWYIQSLCQSLRERCPRGDDILTILTEVNYEVSNKDDKKNMGKQMPQPTFTLRKKLVFPSD

SEQ ID NO: 147 - protein, 496 aa, Homo sapiens
MDFSRNLYDIGEQLDSEDLASLKFLSLDYIPQRKQEPIKDALMLFQRLQEKRMLEESNLSFLKELLFRINRLDLLITYLNTRKEEMERELQTPGRAQISAYRFHFCRMSWAEANSQCQTQSVPFWRRVDHLLIRVMLYQISEEVSRSELRSFKFLLQEEISKCKLDDDMNLLDIFIEMEKRVILGEGKLDILKRVCAQINKSLLKIINDYEEFSKGEELCGVMTISDSPREQDSESQTLDKVYQMKSKPRGYCLIINNHNFAKAREKVPKLHSIRDRNGTHLDAGALTTTFEELHFEIKPHDDCTVEQIYEILKIYQLMDHSNMDCFICCILSHGDKGIIYGTDGQEAPIYELTSQFTGLKCPSLAGKPKVFFIQACQGDNYQKGIPVETDSEEQPYLEMDLSSPQTRYIPDEADFLLGMATVNNCVSYRNPAEGTWYIQSLCQSLRERCPRGDDILTILTEVNYEVSNKDDKKNMGKQMPQPTFTLRKKLVFPSD

SEQ ID NO: 148 - protein, 479 aa, Homo sapiens
MDFSRNLYDIGEQLDSEDLASLKFLSLDYIPQRKQEPIKDALMLFQRLQEKRMLEESNLSFLKELLFRINRLDLLITYLNTRKEEMERELQTPGRAQISAYRVMLYQISEEVSRSELRSFKFLLQEEISKCKLDDDMNLLDIFIEMEKRVILGEGKLDILKRVCAQINKSLLKIINDYEEFSKERSSSLEGSPDEFSNGEELCGVMTISDSPREQDSESQTLDKVYQMKSKPRGYCLIINNHNFAKAREKVPKLHSIRDRNGTHLDAGALTTTFEELHFEIKPHDDCTVEQIYEILKIYQLMDHSNMDCFICCILSHGDKGIIYGTDGQEAPIYELTSQFTGLKCPSLAGKPKVFFIQACQGDNYQKGIPVETDSEEQPYLEMDLSSPQTRYIPDEADFLLGMATVNNCVSYRNPAEGTWYIQSLCQSLRERCPRGDDILTILTEVNYEVSNKDDKKNMGKQMPQPTFTLRKKLVFPSD

SEQ ID NO: 149 - protein, 464 aa, Homo sapiens; identical to SEQ ID NO: 145

SEQ ID NO: 150 - protein, 235 aa, Homo sapiens
MDFSRNLYDIGEQLDSEDLASLKFLSLDYIPQRKQEPIKDALMLFQRLQEKRMLEESNLSFLKELLFRINRLDLLITYLNTRKEEMERELQTPGRAQISAYRVMLYQISEEVSRSELRSFKFLLQEEISKCKLDDDMNLLDIFIEMEKRVILGEGKLDILKRVCAQINKSLLKIINDYEEFSKERSSSLEGSPDEFSNDFGQSLPNEKQTSGILSDHQQSQFCKSTGESAQTSQH

SEQ ID NO: 151 - protein, 257 aa, Homo sapiens
MAQRMTTQLLLLLVWVAVVGEAQTRIAWARTELLNVCMNAKHHKEKPGPEDKLHEQCRPWRKNACCSTNTSQEAHKDVSYLYRFNWNHCGEMAPACKRHFIQDTCLYECSPNLGPWIQQVDQSWRKERVLNVPLCKEDCEQWWEDCRTSYTCKSNWHKGWNWTSGFNKCAVGAACQPFHFYFPTPTVLCNEIWTHSYKVSNYSRGSGRCIQMWFDPAQGNPNEEVARFYAAAMSGAGPWAAWPFLLSLALMLLWLLS

SEQ ID NO: 152 - protein, 257 aa, Homo sapiens; identical to SEQ ID NO: 151

SEQ ID NO: 153 - protein, 257 aa, Homo sapiens; identical to SEQ ID NO: 151

SEQ ID NO: 154 - protein, 257 aa, Homo sapiens; identical to SEQ ID NO: 151

SEQ ID NO: 155 - protein, 459 aa, Homo sapiens
MAPLCPSPWLPLLIPAPAPGLTVQLLLSLLLLVPVHPQRLPRMQEDSPLGGGSSGEDDPLGEEDLPSEEDSPREEDPPGEEDLPGEEDLPGEEDLPEVKPKSEEEGSLKLEDLPTVEAPGDPQEPQNNAHRDKEGDDQSHWRYGGDPPWPRVSPACAGRFQSPVDIRPQLAAFCPALRPLELLGFQLPPLPELRLRNNGHSVQLTLPPGLEMALGPGREYRALQLHLHWGAAGRPGSEHTVEGHRFPAEIHVVHLSTAFARVDEALGRPGGLAVLAAFLEEGPEENSAYEQLLSRLEEIAEEGSETQVPGLDISALLPSDFSRYFQYEGSLTTPPCAQGVIWTVFNQTVMLSAKQLHTLSDTLWGPGDSRLQLNFRATQPLNGRVIEASFPAGVDSSPRAAEPVQLNSCLAAGDILALVFGLLFAVTSVAFLVQMRRQHRRGTKGGVSYRPAEVAETGA

SEQ ID NO: 156 - protein, 557 aa, Homo sapiens
MPPPRLLFFLLFLTPMEVRPEEPLVVKVEEGDNAVLQCLKGTSDGPTQQLTWSRESPLKPFLKLSLGLPGLGIHMRPLAIWLFIFNVSQQMGGFYLCQPGPPSEKAWQPGWTVNVEGSGELFRWNVSDLGGLGCGLKNRSSEGPSSPSGKLMSPKLYVWAKDRPEIWEGEPPCLPPRDSLNQSLSQDLTMAPGSTLWLSCGVPPDSVSRGPLSWTHVHPKGPKSLLSLELKDDRPARDMWVMETGLLLPRATAQDAGKYYCHRGNLTMSFHLEITARPVLWHWLLRTGGWKVSAVTLAYLIFCLCSLVGILHLQRALVLRRKRKRMTDPTRRFFKVTPPPGSGPQNQYGNVLSLPTPTSGLGRAQRWAAGLGGTAPSYGNPSSDVQADGALGSRSPPGVGPEEEEGEGYEEPDSEEDSEFYENDSNLGQDQLSQDGSGYENPEDEPLGPEDEDSFSNAESYENEDEELTQPVARTMDFLSPHGSAWDPSREATSLAGSQSYEDMRGILYAAPQLRSIRGQPGPNHEEDADSYENMDNPDGPDPAWGGGGRMGTWSTR

SEQ ID NO: 157 - protein, 556 aa, Homo sapiens [sequence omitted]

SEQ ID NO: 158 - protein, 297 aa, Homo sapiens
MTTPRNSVNGTFPAEPMKGPIAMQSGPKPLFRRMSSLVGPTQSFFMRESKTLGAVQIMNGLFHIALGGLLMIPAGIYAPICVTVWYPLWGGIMYIISGSLLAATEKNSRKCLVKGKMIMNSLSLFAAISGMILSIMDILNIKISHFLKMESLNFIRAHTPYINIYNCEPANPSEKNSPSTQYCYSIQSLFLGILSVMLIFAFFQELVIAGIVENEWKRTCSRPKSNIVLLSAEEKKEQTIEIKEEVVGLTETSSQPKNEEDIEIIPIQEEEEEETETNFPEPPQDQESSPIENDSSP

SEQ ID NO: 159 - protein, 297 aa, Homo sapiens; identical to SEQ ID NO: 158

SEQ ID NO: 160 - protein, 759 aa, Homo sapiens
MHLLGPWLLLLVLEYLAFSDSSKWVFEHPETLYAWEGACVWIPCTYRALDGDLESFILFHNPEYNKNTSKFDGTRLYESTKDGKVPSEQKRVQFLGDKNKNCTLSIHPVHLNDSGQLGLRMESKTEKWMERIHLNVSERPFPPHIQLPPEIQESQEVTLTCLLNFSCYGYPIQLQWLLEGVPMRQAAVTSTSLTIKSVFTRSELKFSPQWSHHGKIVTCQLQDADGKFLSNDTVQLNVKHTPKLEIKVTPSDAIVREGDSVTMTCEVSSSNPEYTTVSWLKDGTSLKKQNTFTLNLREVTKDQSGKYCCQVSNDVGPGRSEEVFLQVQYPPKKVTTVIQNPMPIREGDTVTLSCNYNSSNPSVTRYEWKPHGAWEEPSLGVLKIQNVGWDNTTIACAACNSWCSWASPVALNVQYAPRDVRVRKIKPLSEIHSGNSVSLQCDFSSSHPKEVQFFWEKNGRLLGKESQLNFDSISPEDAGSYSCWVNNSIGQTASKAWTLEVLYAPRRLRVSMSPGDQVMEGKSATLTCESDANPPVSHYTWFDWNNQSLPYHSQKLRLEPVKVQHSGAYWCQGTNSVGKGRSPLSTLTVYYSPETIGRRVAVGLGSCLAILILAICGLKLQRRWKRTQSQQGLQENSSGQSFFVRNKKVRRAPLSEGPHSLGCYNPMMEDGISYTTLRFPEMNIPRTGDAESSEMQRPPPDCDDTVTYSALHKRQVGDYENVIPDFPEDEGIHYSELIQFGVGERPQAQENVDYVILKH

SEQ ID NO: 161 - protein, 751 aa, Homo sapiens
MHLLGPWLLLLVLEYLAFSDSSKWVFEHPETLYAWEGACVWIPCTYRALDGDLESFILFHNPEYNKNTSKFDGTRLYESTKDGKVPSEQKRVQFLGDKNKNCTLSIHPVHLNDSGQLGLRMESKTEKWMERIHLNVSERPFPPHIQLPPEIQESQEVTLTCLLNFSCYGYPIQLQWLLEGVPMRQAAVTSTSLTIKSVFTRSELKFSPQWSHHGKIVTCQLQDADGKFLSNDTVQLNVKHTPKLEIKVTPSDAIVREGDSVTMTCEVSSSNPEYTTVSWLKDGTSLKKQNTFTLNLREVTKDQSGKYCCQVSNDVGPGRSEEVFLQVQYAPEPSTVQILHSPAVEGSQVEFLCMSLANPLPTNYTWYHNGKEMQGRTEEKVHIPKILPWHAGTYSCVAENILGTGQRGPGAELDVQYPPKKVTTVIQNPMPIREGDTVTLSCNYNSSNPSVTRYEWKPHGAWEEPSLGVLKIQNVGWDNTTIACAACNSWCSWASPVALNVQYAPRDVRVRKIKPLSEIHSGNSVSLQCDFSSSHPKEVQFFWEKNGRLLGKESQLNFDSISPEDAGSYSCWVNNSIGQTASKAWTLEVLYAPRRLRVSMSPGDQVMEGKSATLTCESDANPPVSHYTWFDWNNQSLPYHSQKLRLEPVKVQHSGAYWCQGTNSVGKGRSPLSTLTVYYSPETIGRRVAVGLGSCLAILILAICGLKLQRRWKRTQSQQGLQENSSGQSFFVRNKKRCRVLRDAETSPGLR

SEQ ID NO: 162 - protein, 670 aa, Homo sapiens
MHLLGPWLLLLVLEYLAFSDSSKWVFEHPETLYAWEGACVWIPCTYRALDGDLESFILFHNPEYNKNTSKFDGTRLYESTKDGKVPSEQKRVQFLGDKNKNCTLSIHPVHLNDSGQLGLRMESKTEKWMERIHLNVSERPFPPHIQLPPEIQESQEVTLTCLLNFSCYGYPIQLQWLLEGVPMRQAAVTSTSLTIKSVFTRSELKFSPQWSHHGKIVTCQLQDADGKFLSNDTVQLNVKHPPKKVTTVIQNPMPIREGDTVTLSCNYNSSNPSVTRYEWKPHGAWEEPSLGVLKIQNVGWDNTTIACAACNSWCSWASPVALNVQYAPRDVRVRKIKPLSEIHSGNSVSLQCDFSSSHPKEVQFFWEKNGRLLGKESQLNFDSISPEDAGSYSCWVNNSIGQTASKAWTLEVLYAPRRLRVSMSPGDQVMEGKSATLTCESDANPPVSHYTWFDWNNQSLPYHSQKLRLEPVKVQHSGAYWCQGTNSVGKGRSPLSTLTVYYSPETIGRRVAVGLGSCLAILILAICGLKLQRRWKRTQSQQGLQENSSGQSFFVRNKKVRRAPLSEGPHSLGCYNPMMEDGISYTTLRFPEMNIPRTGDAESSEMQRPPPDCDDTVTYSALHKRQVGDYENVIPDFPEDEGIHYSELIQFGVGERPQAQENVDYVILKH

SEQ ID NO: 163 - protein, 847 aa, Homo sapiens
MHLLGPWLLLLVLEYLAFSDSSKWVFEHPETLYAWEGACVWIPCTYRALDGDLESFILFHNPEYNKNTSKFDGTRLYESTKDGKVPSEQKRVQFLGDKNKNCTLSIHPVHLNDSGQLGLRMESKTEKWMERIHLNVSERPFPPHIQLPPEIQESQEVTLTCLLNFSCYGYPIQLQWLLEGVPMRQAAVTSTSLTIKSVFTRSELKFSPQWSHHGKIVTCQLQDADGKFLSNDTVQLNVKHTPKLEIKVTPSDAIVREGDSVTMTCEVSSSNPEYTTVSWLKDGTSLKKQNTFTLNLREVTKDQSGKYCCQVSNDVGPGRSEEVFLQVQYAPEPSTVQILHSPAVEGSQVEFLCMSLANPLPTNYTWYHNGKEMQGRTEEKVHIPKILPWHAGTYSCVAENILGTGQRGPGAELDVQYPPKKVTTVIQNPMPIREGDTVTLSCNYNSSNPSVTRYEWKPHGAWEEPSLGVLKIQNVGWDNTTIACAACNSWCSWASPVALNVQYAPRDVRVRKIKPLSEIHSGNSVSLQCDFSSSHPKEVQFFWEKNGRLLGKESQLNFDSISPEDAGSYSCWVNNSIGQTASKAWTLEVLYAPRRLRVSMSPGDQVMEGKSATLTCESDANPPVSHYTWFDWNNQSLPYHSQKLRLEPVKVQHSGAYWCQGTNSVGKGRSPLSTLTVYYSPETIGRRVAVGLGSCLAILILAICGLKLQRRWKRTQSQQGLQENSSGQSFFVRNKKVRRAPLSEGPHSLGCYNPMMEDGISYTTLRFPEMNIPRTGDAESSEMQRPPPDCDDTVTYSALHKRQVGDYENVIPDFPEDEGIHYSELIQFGVGERPQAQENVDYVILKH

SEQ ID NO: 164 - protein, 847 aa, Homo sapiens; identical to SEQ ID NO: 163

SEQ ID NO: 165 - protein, 595 aa, Homo sapiens
MRVLLAALGLLFLGALRAFPQDRPFEDTCHGNPSHYYDKAVRRCCYRCPMGLFPTQQCPQRPTDCRKQCEPDYYLDEADRCTACVTCSRDDLVEKTPCAWNSSRVCECRPGMFCSTSAVNSCARCFFHSVCPAGMIVKFPGTAQKNTVCEPASPGVSPACASPENCKEPSSGTIPQAKPTPVSPATSSASTMPVRGGTRLAQEAASKLTRAPDSPSSVGRPSSDPGLSPTQPCPEGSGDCRKQCEPDYYLDEAGRCTACVSCSRDDLVEKTPCAWNSSRTCECRPGMICATSATNSCARCVPYPICAAETVTKPQDMAEKDTTFEAPPLGTQPDCNPTPENGEAPASTSPTQSLLVDSQASKTLPIPTSAPVALSSTGKPVLDAGPVLFWVILVLVVVVGSSAFLLCHRRACRKRIRQKLHLCYPVQTSQPKLELVDSRPRRSSTQLRSGASVTEPVAEERGLMSQPLMETCHSVGAAYLESLPLQDASPAGGPSSPRDLPEPRVSTEHTNNKIEKIYIMKADTVIVGTVKAELPEGRGLAGPAEPELEEELEADHTPHYPEQETEPPLGSCSDVMLSVEEEGKEDPLPTAASGK

SEQ ID NO: 166 - protein, 483 aa, Homo sapiens
MFCSTSAVNSCARCFFHSVCPAGMIVKFPGTAQKNTVCEPASPGVSPACASPENCKEPSSGTIPQAKPTPVSPATSSASTMPVRGGTRLAQEAASKLTRAPDSPSSVGRPSSDPGLSPTQPCPEGSGDCRKQCEPDYYLDEAGRCTACVSCSRDDLVEKTPCAWNSSRTCECRPGMICATSATNSCARCVPYPICAAETVTKPQDMAEKDTTFEAPPLGTQPDCNPTPENGEAPASTSPTQSLLVDSQASKTLPIPTSAPVALSSTGKPVLDAGPVLFWVILVLVVVVGSSAFLLCHRRACRKRIRQKLHLCYPVQTSQPKLELVDSRPRRSSTLRSGASVTEPVAEERGLMSQPLMETCHSVGAAYLESLPLQDASPAGGPSSPRDLPEPRVSTEHTNNKIEKIYIMKADTVIVGTVKAELPEGRGLAGPAEPELEEELEADHTPHYPEQETEPPLGSCSDVMLSVEEEGKEDPLPTAASGK

SEQ ID NO: 167 - protein, 237 aa, Homo sapiens
MPLLLLLPLLWADLTHRPKILIPGTLEPGHSKNLTCSVSWACEQGTPPIFSWLSAAPTSLGPRTTHSSVLIITPRPQDHGTNLTCQVKFAGAGVTTERTIQLNVTYVPQNPTTGIFPGDGSGKQETRAGVVHGAIGGAGVTALLALCLCLIFFIVKTHRRKAARTAVGRNDTHPTTGSASPKHQKKSKLHGPTETSSCSGAAPTVEMDEELHYASLNFHGMNPSKDTSTEYSEVRTQ

SEQ ID NO: 168 - protein, 310 aa, Homo sapiens
MPLLLLLPLLWAGALAMDPNFWLQVQESVTVQEGLCVLVPCTFFHPIPYYDKNSPVHGYWFREGAIISRDSPVATNKLDQEVQEETQGRFRLLGDPSRNNCSLSIVDARRRDNGSYFFRMERGSTKYSYKSPQLSVHVTDLTHRPKILIPGTLEPGHSKNLTCSVSWACEQGTPPIFSWLSAAPTSLGPRTTHSSVLIITPRPQDHGTNLTCQVKFAGAGVTTERTIQLNVTYVPQNPTTGIFPGDGSGKQETRAGVVHGAIGGAGVTALLALCLCLIFFIVKTHRRKAARTAVGRNDTHPTTGSASPVR

SEQ ID NO: 169 - protein, 364 aa, Homo sapiens
MPLLLLLPLLWAGALAMDPNFWLQVQESVTVQEGLCVLVPCTFFHPIPYYDKNSPVHGYWFREGAIISRDSPVATNKLDQEVQEETQGRFRLLGDPSRNNCSLSIVDARRRDNGSYFFRMERGSTKYSYKSPQLSVHVTDLTHRPKILIPGTLEPGHSKNLTCSVSWACEQGTPPIFSWLSAAPTSLGPRTTHSSVLIITPRPQDHGTNLTCQVKFAGAGVTTERTIQLNVTYVPQNPTTGIFPGDGSGKQETRAGVVHGAIGGAGVTALLALCLCLIFFIVKTHRRKAARTAVGRNDTHPTTGSASPKHQKKSKLHGPTETSSCSGAAPTVEMDEELHYASLNFHGMNPSKDTSTEYSEVRTQ

SEQ ID NO: 170 - protein, 742 aa, Homo sapiens
MDKFWWHAAWGLCLVPLSLAQIDLNITCRFAGVFHVEKNGRYSISRTEAADLCKAFNSTLPTMAQMEKALSIGFETCRYGFIEGHVVIPRIHPNSICAANNTGVYILTSNTSQYDTYCFNASAPPEEDCTSVTDLPNAFDGPITITIVNRDGTRYVQKGEYRTNPEDIYPSNPTDDDVSSGSSSERSSTSGGYIFYTFSTVHPIPDEDSPWITDSTDRIPATTLMSTSATATETATKRQETWDWFSWLFLPSESKNHLHTTTQMAGTSSNTISAGWEPNEENEDERDRHLSFSGSGIDDDEDFISSTISTTPRAFDHTKQNQDWTQWNPSHSNPEVLLQTTTRMTDVDRNGTTAYEGNWNPEAHPPLIHHEHHEEEETPHSTSTIQATPSSTTEETATQKEQWFGNRWHEGYRQTPKEDSHSTTGTAAASAHTSHPMQGRTTPSPEDSSWTDFFNPISHPMGRGHQAGRRMDMDSSHSITLQPTANPNTGLVEDLDRTGPLSMTTQQSNSQSFSTSHEGLEEDKDHPTTSTLTSSNRNDVTGGRRDPNHSEGSTTLLEGYTSHYPHTKESRTFIPVTSAKTGSFGVTAVTVGDSNSNVNRSLSGDQDTFHPSGGSHTTHGSESDGHSHGSQEGGANTTSGPIRTPQIPEWLIILASLLALALILAVCIAVNSRRRCGQKKKLVINSGNGAVEDRKPSGLNGEASKSQEMVHLVNKESSETPDQFMTADETRNLQNVDMKIGV

SEQ ID NO: 171 - protein, 699 aa, Homo sapiens
MDKFWWHAAWGLCLVPLSLAQIDLNITCRFAGVFHVEKNGRYSISRTEAADLCKAFNSTLPTMAQMEKALSIGFETCRYGFIEGHVVIPRIHPNSICAANNTGVYILTSNTSQYDTYCFNASAPPEEDCTSVTDLPNAFDGPITITIVNRDGTRYVQKGEYRTNPEDIYPSNPTDDDVSSGSSSERSSTSGGYIFYTFSTVHPIPDEDSPWITDSTDRIPATSTSSNTISAGWEPNEENEDERDRHLSFSGSGIDDDEDFISSTISTTPRAFDHTKQNQDWTQWNPSHSNPEVLLQTTTRMTDVDRNGTTAYEGNWNPEAHPPLIHHEHHEEEETPHSTSTIQATPSSTTEETATQKEQWFGNRWHEGYRQTPKEDSHSTTGTAAASAHTSHPMQGRTTPSPEDSSWTDFFNPISHPMGRGHQAGRRMDMDSSHSITLQPTANPNTGLVEDLDRTGPLSMTTQQSNSQSFSTSHEGLEEDKDHPTTSTLTSSNRNDVTGGRRDPNHSEGSTTLLEGYTSHYPHTKESRTFIPVTSAKTGSFGVTAVTVGDSNSNVNRSLSGDQDTFHPSGGSHTTHGSESDGHSHGSQEGGANTTSGPIRTPQIPEWLIILASLLALALILAVCIAVNSRRRCGQKKKLVINSGNGAVEDRKPSGLNGEASKSQEMVHLVNKESSETPDQFMTADETRNLQNVDMKIGV

SEQ ID NO: 172 - protein, 493 aa, Homo sapiens
MDKFWWHAAWGLCLVPLSLAQIDLNITCRFAGVFHVEKNGRYSISRTEAADLCKAFNSTLPTMAQMEKALSIGFETCRYGFIEGHVVIPRIHPNSICAANNTGVYILTSNTSQYDTYCFNASAPPEEDCTSVTDLPNAFDGPITITIVNRDGTRYVQKGEYRTNPEDIYPSNPTDDDVSSGSSSERSSTSGGYIFYTFSTVHPIPDEDSPWITDSTDRIPATNMDSSHSITLQPTANPNTGLVEDLDRTGPLSMTTQQSNSQSFSTSHEGLEEDKDHPTTSTLTSSNRNDVTGGRRDPNHSEGSTTLLEGYTSHYPHTKESRTFIPVTSAKTGSFGVTAVTVGDSNSNVNRSLSGDQDTFHPSGGSHTTHGSESDGHSHGSQEGGANTTSGPIRTPQIPEWLIILASLLALALILAVCIAVNSRRRCGQKKKLVINSGNGAVEDRKPSGLNGEASKSQEMVHLVNKESSETPDQFMTADETRNLQNVDMKIGV

SEQ ID NO: 173 - protein, 361 aa, Homo sapiens
MDKFWWHAAWGLCLVPLSLAQIDLNITCRFAGVFHVEKNGRYSISRTEAADLCKAFNSTLPTMAQMEKALSIGFETCRYGFIEGHVVIPRIHPNSICAANNTGVYILTSNTSQYDTYCFNASAPPEEDCTSVTDLPNAFDGPITITIVNRDGTRYVQKGEYRTNPEDIYPSNPTDDDVSSGSSSERSSTSGGYIFYTFSTVHPIPDEDSPWITDSTDRIPATRDQDTFHPSGGSHTTHGSESDGHSHGSQEGGANTTSGPIRTPQIPEWLIILASLLALALILAVCIAVNSRRRCGQKKKLVINSGNGAVEDRKPSGLNGEASKSQEMVHLVNKESSETPDQFMTADETRNLQNVDMKIGV

SEQ ID NO: 174 - protein, 139 aa, Homo sapiens
MDKFWWHAAWGLCLVPLSLAQIDLNITCRFAGVFHVEKNGRYSISRTEAADLCKAFNSTLPTMAQMEKALSIGFETCSLHCSQQSKKVWAEEKASDQQWQWSCGGQKAKWTQRRGQQVSGNGAFGEQGVVRNSRPVYDS

SEQ ID NO: 175 - protein, 429 aa, Homo sapiens
MDKFWWHAAWGLCLVPLSLAQIDLNITCRFAGVFHVEKNGRYSISRTEAADLCKAFNSTLPTMAQMEKALSIGFETCRYGFIEGHVVIPRIHPNSICAANNTGVYILTSNTSQYDTYCFNASAPPEEDCTSVTDLPNAFDGPITITIVNRDGTRYVQKGEYRTNPEDIYPSNPTDDDVSSGSSSERSSTSGGYIFYTFSTVHPIPDEDSPWITDSTDRIPATNRNDVTGGRRDPNHSEGSTTLLEGYTSHYPHTKESRTFIPVTSAKTGSFGVTAVTVGDSNSNVNRSLSGDQDTFHPSGGSHTTHGSESDGHSHGSQEGGANTTSGPIRTPQIPEWLIILASLLALALILAVCIAVNSRRRCGQKKKLVINSGNGAVEDRKPSGLNGEASKSQEMVHLVNKESSETPDQFMTADETRNLQNVDMKIGV

SEQ ID NO: 176 - protein, 340 aa, Homo sapiens
MDKFWWHAAWGLCLVPLSLAQIDLNITCRFAGVFHVEKNGRYSISRTEAADLCKAFNSTLPTMAQMEKALSIGFETCRYGFIEGHVVIPRIHPNSICAANNTGVYILTSNTSQYDTYCFNASAPPEEDCTSVTDLPNAFDGPITITIVNRDGTRYVQKGEYRTNPEDIYPSNPTDDDVSSGSSSERSSTSGGYIFYTFSTVHPIPDEDSPWITDSTDRIPATRHSHGSQEGGANTTSGPIRTPQIPEWLIILASLLALALILAVCIAVNSRRRCGQKKKLVINSGNGAVEDRKPSGLNGEASKSQEMVHLVNKESSETPDQFMTADETRNLQNVDMKIGV

SEQ ID NO: 177 - protein, 294 aa, Homo sapiens
MDKFWWHAAWGLCLVPLSLAQIDLNITCRFAGVFHVEKNGRYSISRTEAADLCKAFNSTLPTMAQMEKALSIGFETCRYGFIEGHVVIPRIHPNSICAANNTGVYILTSNTSQYDTYCFNASAPPEEDCTSVTDLPNAFDGPITITIVNRDGTRYVQKGEYRTNPEDIYPSNPTDDDVSSGSSSERSSTSGGYIFYTFSTVHPIPDEDSPWITDSTDRIPATRDQDTFHPSGGSHTTHGSESDGHSHGSQEGGANTTSGPIRTPQIPEWLIILASLLALALILAVCIAVNSRRS

SEQ ID NO: 178 - protein, 314 aa, Homo sapiens
MAPPQVLAFGLLLAAATATFAAAQEECVCENYKLAVNCFVNNNRQCQCTSVGAQNTVICSKLAAKCLVMKAEMNGSKLGRRAKPEGALQNNDGLYDPDCDESGLFKAKQCNGTSMCWCVNTAGVRRTDKDTEITCSERVRTYWIIIELKHKAREKPYDSKSLRTALQKEITTRYQLDPKFITSILYENNVITIDLVQNSSQKTQNDVDIADVAYYFEKDVKGESLFHSKKMDLTVNGEQLDLDPGQTLIYYVDEKAPEFSMQGLKAGVIAVIVVVVIAVVAGIVVLVISRKKRMAKYEKAEIKEMGEMHRELNA

SEQ ID NO: 179 - protein, 1225 aa, Homo sapiens; identical to SEQ ID NO: 135

SEQ ID NO: 180 - protein, 1240 aa, Homo sapiens; identical to SEQ ID NO: 136

SEQ ID NO: 181 - protein, 1055 aa, Homo sapiens; identical to SEQ ID NO: 137

SEQ ID NO: 182 - protein, 603 aa, Homo sapiens; identical to SEQ ID NO: 138

SEQ ID NO: 183 - protein, 1255 aa, Homo sapiens [sequence omitted]

SEQ ID NO: 184 - protein, 183 aa, Homo sapiens
MRANDALQVLGLLFSLARGSEVGNSQAVCPGTLNGLSVTGDAENQYQTLYKLYERCEVVMGNLEIVLTGHNADLSFLQWIREVTGYVLVAMNEFSTLPLPNLRVVRGTQVYDGKFAIFVMLNYNTNSSHALRQLRLTQLTGQFPMVPSGLTPQPAQDWYLLDDDPRLLTLSASSKVPVTLAAV

SEQ ID NO: 185 - protein, 1342 aa, Homo sapiens
MRANDALQVLGLLFSLARGSEVGNSQAVCPGTLNGLSVTGDAENQYQTLYKLYERCEVVMGNLEIVLTGHNADLSFLQWIREVTGYVLVAMNEFSTLPLPNLRVVRGTQVYDGKFAIFVMLNYNTNSSHALRQLRLTQLTEILSGGVYIEKNDKLCHMDTIDWRDIVRDRDAEIVVKDNGRSCPPCHEVCKGRCWGPGSEDCQTLTKTICAPQCNGHCFGPNPNQCCHDECAGGCSGPQDTDCFACRHFNDSGACVPRCPQPLVYNKLTFQLEPNPHTKYQYGGVCVASCPHNFVVDQTSCVRACPPDKMEVDKNGLKMCEPCGGLCPKACEGTGSGSRFQTVDSSNIDGFVNCTKILGNLDFLITGLNGDPWHKIPALDPEKLNVFRTVREITGYLNIQSWPPHMHNFSVFSNLTTIGGRSLYNRGFSLLIMKNLNVTSLGFRSLKEISAGRIYISANRQLCYHHSLNWTKVLRGPTEERLDIKHNRPRRDCVAEGKVCDPLCSSGGCWGPGPGQCLSCRNYSRGGVCVTHCNFLNGEPREFAHEAECFSCHPECQPMEGTATCNGSGSDTCAQCAHFRDGPHCVSSCPHGVLGAKGPIYKYPDVQNECRPCHENCTQGCKGPELQDCLGQTLVLIGKTHLTMALTVIAGLVVIFMMLGGTFLYWRGRRIQNKRAMRRYLERGESIEPLDPSEKANKVLARIFKETELRKLKVLGSGVFGTVHKGVWIPEGESIKIPVCIKVIEDKSGRQSFQAVTDHMLAIGSLDHAHIVRLLGLCPGSSLQLVTQYLPLGSLLDHVRQHRGALGPQLLLNWGVQIAKGMYYLEEHGMVHRNLAARNVLLKSPSQVQVADFGVADLLPPDDKQLLYSEAKTPIKWMALESIHFGKYTHQSDVWSYGVTVWELMTFGAEPYAGLRLAEVPDLLEKGERLAQPQICTIDVYMVMVKCWMIDENIRPTFKELANEFTRMARDPPRYLVIKRESGPGIAPGPEPHGLTNKKLEEVELEPELDLDLDLEAEEDNLATTTLGSALSLPVGTLNRPRGSQSLLSPSSGYMPMNQGNLGESCQESAVSGSSERCPRPVSLHPMPRGCLASESSEGHVTGSEAELQEKVSMCRSRSRSRSPRPRGDSAYHSQRHSLLTPVTPLSPPGLEEEDVNGYVMPDTHLKGTPSSREGTLSSVGLSSVLGTEEEDEDEEYEYMNRRRRHSPPHPPRPSSLEELGYEYMDVGSDLSASLGSTQSCPLHPVPIMPTAGTTPDEDYEYMNRQRDGGGPGGDYAAMGACPASEQGYEEMRAFQGPGHQAPHVHYARLKTLRSLEATDSAFDNPDYWHSRLFPKANAQRT

SEQ ID NO: 186 - protein, 665 aa, Homo sapiens
MADYSTVPPPSSGSAGGGGGGGGGGGVNDAFKDALQRARQIAAKIGGDAGTSLNSNDYGYGGQKRPLEDGDGSWTSPSSTTHWEGMPSPFKDQPDAKKVAPQNDSFGTQLPPMHQQQSRSVMTEEYKVPDGMVGFIIGRGGEQISRIQQESGCKIQIAPDSGGLPERSCMLTGTPESVQSAKRLLDQIVEKGRPAPGFHHGDGPGNAVQEIMIPASKAGLVIGKGGETIKQLQERAGVKMVMIQDGPQNTGADKPLRITGDPYKVQQAKEMVLELIRDQGGFREVRNEYGSRIGGNEGIDVPIPRFAVGIVIGRNGEMIKKIQNDAGVRIQFKPDDGTTPERIAQITGPPDRCQHAAEIITDLLRSVQAGNPGGPGPGGRGRGRGQGNWNMGPPGGLQEFNFIVPTGKTGLIIGKGGETIKSISQQSGARIELQRNPPPNADPNMKLFTIRGTPQQIDYARQLIEEKIGGPVNPLGPPVPHGPHGVPGPHGPPGPPGPGTPMGPYNPAPYNPGPPGPAPHGPPAPYAPQGWGNAYPHWQQQAPPDPAKAGTDPNSAAWAAYYAHYYQQQAQPPPAAPAGAPTTTQTNGQGDQQNPAPAGQVDYTKAWEEYYKKMGQAVPAPTGAPPGGQPDYSAAWAEYYRQQAAYYAQTSPQGMPQHPPAPQGQ

SEQ ID NO: 187 - protein, 644 aa, Homo sapiens
MADYSTVPPPSSGSAGGGGGGGGGGGVNDAFKDALQRARQIAAKIGGDAGTSLNSNDYGYGGQKRPLEDGDQPDAKKVAPQNDSFGTQLPPMHQQQSRSVMTEEYKVPDGMVGFIIGRGGEQISRIQQESGCKIQIAPDSGGLPERSCMLTGTPESVQSAKRLLDQIVEKGRPAPGFHHGDGPGNAVQEIMIPASKAGLVIGKGGETIKQLQERAGVKMVMIQDGPQNTGADKPLRITGDPYKVQQAKEMVLELIRDQGGFREVRNEYGSRIGGNEGIDVPIPRFAVGIVIGRNGEMIKKIQNDAGVRIQFKPDDGTTPERIAQITGPPDRCQHAAEIITDLLRSVQAGNPGGPGPGGRGRGRGQGNWNMGPPGGLQEFNFIVPTGKTGLIIGKGGETIKSISQQSGARIELQRNPPPNADPNMKLFTIRGTPQQIDYARQLIEEKIGGPVNPLGPPVPHGPHGVPGPHGPPGPPGPGTPMGPYNPAPYNPGPPGPAPHGPPAPYAPQGWGNAYPHWQQQAPPDPAKAGTDPNSAAWAAYYAHYYQQQAQPPPAAPAGAPTTTQTNGQGDQQNPAPAGQVDYTKAWEEYYKKMGQAVPAPTGAPPGGQPDYSAAWAEYYRQQAAYYAQTSPQGMPQHPPAPQGQ

SEQ ID NO: 188 - protein, 380 aa, Homo sapiens
MAFVCLAIGCLYTFLISTTFGCTSSSDTEIKVNPPQDFEIVDPGYLGYLYLQWQPPLSLDHFKECTVEYELKYRNIGSETWKTIITKNLHYKDGFDLNKGIEAKIHTLLPWQCTNGSEVQSSWAETTYWISPQGIPETKVQDMDCVYYNWQYLLCSWKPGIGVLLDTNYNLFYWYEGLDHALQCVDYIKADGQNIGCRFPYLEASDYKDFYICVNGSSENKPIRSSYFTFQLQNIVKPLPPVYLTFTRESSCEIKLKWSIPLGPIPARCFDYEIEIREDDTTLVTATVENETYTLKTTNETRQLCFVVRSKVNIYCSDDGIWSEWSDKQCWEGEDLSKKTLLRFWLPFGFILILVIFVTGLLLRKPNTYPKMIPEFFCDT

SEQ ID NO: 189 - protein, 1356 aa, Homo sapiens
MQSKVLLAVALWLCVETRAASVGLPSVSLDLPRLSIQKDILTIKANTTLQITCRGQRDLDWLWPNNQSGSEQRVEVTECSDGLFCKTLTIPKVIGNDTGAYKCFYRETDLASVIYVYVQDYRSPFIASVSDQHGVVYITENKNKTVVIPCLGSISNLNVSLCARYPEKRFVPDGNRISWDSKKGFTIPSYMISYAGMVFCEAKINDESYQSIMYIVVVVGYRIYDVVLSPSHGIELSVGEKLVLNCTARTELNVGIDFNWEYPSSKHQHKKLVNRDLKTQSGSEMKKFLSTLTIDGVTRSDQGLYTCAASSGLMTKKNSTFVRVHEKPFVAFGSGMESLVEATVGERVRIPAKYLGYPPPEIKWYKNGIPLESNHTIKAGHVLTIMEVSERDTGNYTVILTNPISKEKQSHVVSLVVYVPPQIGEKSLISPVDSYQYGTTQTLTCTVYAIPPPHHIHWYWQLEEECANEPSQAVSVTNPYPCEEWRSVEDFQGGNKIEVNKNQFALIEGKNKTVSTLVIQAANVSALYKCEAVNKVGRGERVISFHVTRGPEITLQPDMQPTEQESVSLWCTADRSTFENLTWYKLGPQPLPIHVGELPTPVCKNLDTLWKLNATMFSNSTNDILIMELKNASLQDQGDYVCLAQDRKTKKRHCVVRQLTVLERVAPTITGNLENQTTSIGESIEVSCTASGNPPPQIMWFKDNETLVEDSGIVLKDGNRNLTIRRVRKEDEGLYTCQACSVLGCAKVEAFFIIEGAQEKTNLEIIILVGTAVIAMFFWLLLVIILRTVKRANGGELKTGYLSIVMDPDELPLDEHCERLPYDASKWEFPRDRLKLGKPLGRGAFGQVIEADAFGIDKTATCRTVAVKMLKEGATHSEHRALMSELKILIHIGHHLNVVNLLGACTKPGGPLMVIVEFCKFGNLSTYLRSKRNEFVPYKTKGARFRQGKDYVGAIPVDLKRRLDSITSSQSSASSGFVEEKSLSDVEEEEAPEDLYKDFLTLEHLICYSFQVAKGMEFLASRKCIHRDLAARNILLSEKNVVKICDFGLARDIYKDPDYVRKGDARLPLKWMAPETIFDRVYTIQSDVWSFGVLLWEIFSLGASPYPGVKIDEEFCRRLKEGTRMRAPDYTTPEMYQTMLDCWHGEPSQRPTFSELVEHLGNLLQANAQQDGKDYIVLPISETLSMEEDSGLSLPTSPVSCMEEEEVCDPKFHYDNTAGISQYLQNSKRKSRPVSVKTFEDIPLEEPEVKVIPDDNQTDSGMVLASEELKTLEDRTKLSPSFGGMVPSKSRESVASEGSNQTSGYQSGYHSDDTDTTVYSSEEAELLKLIEIGVQTGSTAQILQPDSGTTLSSPPV

SEQ ID NO: 190 - protein, 317 aa, Homo sapiens
MFQAAERPQEWAMEGPRDGLKKERLLDDRHDSGLDSMKDEEYEQMVKELQEIRLEPQEVPRGSEPWKQQLTEDGDSFLHLAIIHEEKALTMEVIRQVKGDLAFLNFQNNLQQTPLHLAVITNQPEIAEALLGAGCDPELRDFRGNTPLHLACEQGCLASVGVLTQSCTTPHLHSILKATNYNGHTCLHLASIHGYLGIVELLVSLGADVNAQEPCNGRTALHLAVDLQNPDLVSLLLKCGADVNRVTYQGYSPYQLTWGRPSTRIQQQLGQLTLENLQMLPESEDEESYDTESEFTEFTEDELPYDDCVFGGQRLTL

SEQ ID NO: 191 - protein, 157 aa, Homo sapiens
MDPRLPAWALVLLGPALVFALGPAPTPEMREKLCGHHFVRALVRVCGGPRWSTEARRPATGGDQRESHSVSQAGLKLLSSSNPPTLTFQSVGISDVSCYSGWRDDICSMGWWPTVISRWDLACSPCPRPLTITATTVQLPPTLHATAASVAVPNKTC

SEQ ID NO: 192 - protein, 131 aa, Homo sapiens
MDPRLPAWALVLLGPALVFALGPAPTPEMREKLCGHHFVRALVRVCGGPRWSTEARRPATGGDRELLQWLERRHLLHGLVADSNLTLGPGLQPLPQTSHHHRHHRAAATNPARYCCLSGCTQQDLLTLCPY

SEQ ID NO: 193 - protein, 1257 aa, Homo sapiens
MVVALRYVWPLLLCSPCLLIQIPEEYEGHHVMEPPVITEQSPRRLVVFPTDDISLKCEASGKPEVQFRWTRDGVHFKPKEELGVTVYQSPHSGSFTITGNNSNFAQRFQGIYRCFASNKLGTAMSHEIRLMAEGAPKWPKETVKPVEVEEGESVVLPCNPPPSAEPLRIYWMNSKILHIKQDERVTMGQNGNLYFANVLTSDNHSDYICHAHFPGTRTIIQKEPIDLRVKATNSMIDRKPRLLFPTNSSSHLVALQGQPLVLECIAEGFPTPTIKWLRPSGPMPADRVTYQNHNKTLQLLKVGEEDDGEYRCLAENSLGSARHAYYVTVEAAPYWLHKPQSHLYGPGETARLDCQVQGRPQPEVTWRINGIPVEELAKDQKYRIQRGALILSNVQPSDTMVTQCEARNRHGLLLANAYIYVVQLPAKILTADNQTYMAVQGSTAYLLCKAFGAPVPSVQWLDEDGTTVLQDERFFPYANGTLGIRDLQANDTGRYFCLAANDQNNVTIMANLKVKDATQITQGPRSTIEKKGSRVTFTCQASFDPSLQPSITWRGDGRDLQELGDSDKYFIEDGRLVIHSLDYSDQGNYSCVASTELDVVESRAQLLVVGSPGPVPRLVLSDLHLLTQSQVRVSWSPAEDHNAPIEKYDIEFEDKEMAPEKWYSLGKVPGNQTSTTLKLSPYVHYTFRVTAINKYGPGEPSPVSETVVTPEAAPEKNPVDVKGEGNETTNMVITWKPLRWMDWNAPQVQYRVQWRPQGTRGPWQEQIVSDPFLVVSNTSTFVPYEIKVQAVNSQGKGPEPQVTIGYSGEDYPQAIPELEGIEILNSSAVLVKWRPVDLAQVKGHLRGYNVTYWREGSQRKHSKRHIHKDHVVVPANTTSVILSGLRPYSSYHLEVQAFNGRGSGPASEFTFSTPEGVPGHPEALHLECQSNTSLLLRWQPPLSHNGVLTGYVLSYHPLDEGGKGQLSFNLRDPELRTHNLTDLSPHLRYRFQLQATTKEGPGEAIVREGGTMALSGISDFGNISATAGENYSVVSWVPKEGQCNFRFHILFKALGEEKGGASLSPQYVSYNQSSYTQWDLQPDTDYEIHLFKERMFRHQMAVKTNGTGRVRLPPAGFATEGWFIGFVSAIILLLLVLLILCFIKRSKGGKYSVKDKEDTQVDSEARPMKDETFGEYRSLESDNEEKAFGSSQPSLNGDIKPLGSDDSLADYGGSVDVQFNEDGSFIGQYSGKKEKEAAGGNDSSGATSPINPAVALE

SEQ ID NO: 194 - protein, 1248 aa, Homo sapiens
MVVALRYVWPLLLCSPCLLIQIPEELMEPPVITEQSPRRLVVFPTDDISLKCEASGKPEVQFRWTRDGVHFKPKEELGVTVYQSPHSGSFTITGNNSNFAQRFQGIYRCFASNKLGTAMSHEIRLMAEGAPKWPKETVKPVEVEEGESVVLPCNPPPSAEPLRIYWMNSKILHIKQDERVTMGQNGNLYFANVLTSDNHSDYICHAHFPGTRTIIQKEPIDLRVKATNSMIDRKPRLLFPTNSSSHLVALQGQPLVLECIAEGFPTPTIKWLRPSGPMPADRVTYQNHNKTLQLLKVGEEDDGEYRCLAENSLGSARHAYYVTVEAAPYWLHKPQSHLYGPGETARLDCQVQGRPQPEVTWRINGIPVEELAKDQKYRIQRGALILSNVQPSDTMVTQCEARNRHGLLLANAYIYVVQLPAKILTADNQTYMAVQGSTAYLLCKAFGAPVPSVQWLDEDGTTVLQDERFFPYANGTLGIRDLQANDTGRYFCLAANDQNNVTIMANLKVKDATQITQGPRSTIEKKGSRVTFTCQASFDPSLQPSITWRGDGRDLQELGDSDKYFIEDGRLVIHSLDYSDQGNYSCVASTELDVVESRAQLLVVGSPGPVPRLVLSDLHLLTQSQVRVSWSPAEDHNAPIEKYDIEFEDKEMAPEKWYSLGKVPGNQTSTTLKLSPYVHYTFRVTAINKYGPGEPSPVSETVVTPEAAPEKNPVDVKGEGNETTNMVITWKPLRWMDWNAPQVQYRVQWRPQGTRGPWQEQIVSDPFLVVSNTSTFVPYEIKVQAVNSQGKGPEPQVTIGYSGEDYPQAIPELEGIEILNSSAVLVKWRPVDLAQVKGHLRGYNVTYWREGSQRKHSKRHIHKDHVVVPANTTSVILSGLRPYSSYHLEVQAFNGRGSGPASEFTFSTPEGVPGHPEALHLECQSNTSLLLRWQPPLSHNGVLTGYVLSYHPLDEGGKGQLSFNLRDPELRTHNLTDLSPHLRYRFQLQATTKEGPGEAIVREGGTMALSGISDFGNISATAGENYSVVSWVPKEGQCNFRFHILFKALGEEKGGASLSPQYVSYNQSSYTQWDLQPDTDYEIHLFKERMFRHQMAVKTNGTGRVRLPPAGFATEGWFIGFVSAIILLLLVLLILCFIKRSKGGKYSVKDKEDTQVDSEARPMKDETFGEYSDNEEKAFGSSQPSLNGDIKPLGSDDSLADYGGSVDVQFNEDGSFIGQYSGKKEKEAAGGNDSSGATSPINPAVALE

SEQ ID NO: 195 - protein, 1257 aa, Homo sapiens; identical to SEQ ID NO: 193

SEQ ID NO: 196 - protein, 1253 aa, Homo sapiens
MVVALRYVWPLLLCSPCLLIQIPEEYEGHHVMEPPVITEQSPRRLVVFPTDDISLKCEASGKPEVQFRWTRDGVHFKPKEELGVTVYQSPHSGSFTITGNNSNFAQRFQGIYRCFASNKLGTAMSHEIRLMAEGAPKWPKETVKPVEVEEGESVVLPCNPPPSAEPLRIYWMNSKILHIKQDERVTMGQNGNLYFANVLTSDNHSDYICHAHFPGTRTIIQKEPIDLRVKATNSMIDRKPRLLFPTNSSSHLVALQGQPLVLECIAEGFPTPTIKWLRPSGPMPADRVTYQNHNKTLQLLKVGEEDDGEYRCLAENSLGSARHAYYVTVEAAPYWLHKPQSHLYGPGETARLDCQVQGRPQPEVTWRINGIPVEELAKDQKYRIQRGALILSNVQPSDTMVTQCEARNRHGLLLANAYIYVVQLPAKILTADNQTYMAVQGSTAYLLCKAFGAPVPSVQWLDEDGTTVLQDERFFPYANGTLGIRDLQANDTGRYFCLAANDQNNVTIMANLKVKDATQITQGPRSTIEKKGSRVTFTCQASFDPSLQPSITWRGDGRDLQELGDSDKYFIEDGRLVIHSLDYSDQGNYSCVASTELDVVESRAQLLVVGSPGPVPRLVLSDLHLLTQSQVRVSWSPAEDHNAPIEKYDIEFEDKEMAPEKWYSLGKVPGNQTSTTLKLSPYVHYTFRVTAINKYGPGEPSPVSETVVTPEAAPEKNPVDVKGEGNETTNMVITWKPLRWMDWNAPQVQYRVQWRPQGTRGPWQEQIVSDPFLVVSNTSTFVPYEIKVQAVNSQGKGPEPQVTIGYSGEDYPQAIPELEGIEILNSSAVLVKWRPVDLAQVKGHLRGYNVTYWREGSQRKHSKRHIHKDHVVVPANTTSVILSGLRPYSSYHLEVQAFNGRGSGPASEFTFSTPEGVPGHPEALHLECQSNTSLLLRWQPPLSHNGVLTGYVLSYHPLDEGGKGQLSFNLRDPELRTHNLTDLSPHLRYRFQLQATTKEGPGEAIVREGGTMALSGISDFGNISATAGENYSVVSWVPKEGQCNFRFHILFKALGEEKGGASLSPQYVSYNQSSYTQWDLQPDTDYEIHLFKERMFRHQMAVKTNGTGRVRLPPAGFATEGWFIGFVSAIILLLLVLLILCFIKRSKGGKYSVKDKEDTQVDSEARPMKDETFGEYSDNEEKAFGSSQPSLNGDIKPLGSDDSLADYGGSVDVQFNEDGSFIGQYSGKKEKEAAGGNDSSGATSPINPAVALE

SEQ ID NO: 197 - protein, 622 aa, Homo sapiens
MALPTARPLLGSCGTPALGSLLFLLFSLGWVQPSRTLAGETGQEAAPLDGVLANPPNISSLSPRQLLGFPCAEVSGLSTERVRELAVALAQKNVKLSTEQLRCLAHRLSEPPEDLDALPLDLLLFLNPDAFSGPQACTRFFSRITKANVDLLPRGAPERQRLLPAALACWGVRGSLLSEADVRALGGLACDLPGRFVAESAEVLLPRLVSCPGPLDQDQQEAARAALQGGGPPYGPPSTWSVSTMDALRGLLPVLGQPIIRSIPQGIVAAWRQRSSRDPSWRQPERTILRPRFRREVEKTACPSGKKAREIDESLIFYKKWELEACVDAALLATQMDRVNAIPFTYEQLDVLKHKLDELYPQGYPESVIQHLGYLFLKMSPEDIRKWNVTSLETLKALLEVNKGHEMSPQVATLIDRFVKGRGQLDKDTLDTLTAFYPGYLCSLSPEELSSVPPSSIWAVRPQDLDTCDPRQLDVLYPKARLAFQNMNGSEYFVKIQSFLGGAPTEDLKALSQQNVSMDLATFMKLRTDAVLPLTVAEVQKLLGPHVEGLKAEERHRPVRDWILRQRQDDLDTLGLGLQGGIPNGYLVLDLSMQEALSGTPCLLGPGPVLTVLALLLASTLA

SEQ ID NO: 198 - protein, 622 aa, Homo sapiens; identical to SEQ ID NO: 197

SEQ ID NO: 199 - protein, 630 aa, Homo sapiens
MALPTARPLLGSCGTPALGSLLFLLFSLGWVQPSRTLAGETGQEAAPLDGVLANPPNISSLSPRQLLGFPCAEVSGLSTERVRELAVALAQKNVKLSTEQLRCLAHRLSEPPEDLDALPLDLLLFLNPDAFSGPQACTRFFSRITKANVDLLPRGAPERQRLLPAALACWGVRGSLLSEADVRALGGLACDLPGRFVAESAEVLLPRLVSCPGPLDQDQQEAARAALQGGGPPYGPPSTWSVSTMDALRGLLPVLGQPIIRSIPQGIVAAWRQRSSRDPSWRQPERTILRPRFRREVEKTACPSGKKAREIDESLIFYKKWELEACVDAALLATQMDRVNAIPFTYEQLDVLKHKLDELYPQGYPESVIQHLGYLFLKMSPEDIRKWNVTSLETLKALLEVNKGHEMSPQAPRRPLPQVATLIDRFVKGRGQLDKDTLDTLTAFYPGYLCSLSPEELSSVPPSSIWAVRPQDLDTCDPRQLDVLYPKARLAFQNMNGSEYFVKIQSFLGGAPTEDLKALSQQNVSMDLATFMKLRTDAVLPLTVAEVQKLLGPHVEGLKAEERHRPVRDWILRQRQDDLDTLGLGLQGGIPNGYLVLDLSMQEALSGTPCLLGPGPVLTVLALLLASTLA

SEQ ID NO: 200 - protein, 264 aa, Homo sapiens; identical to SEQ ID NO: 104

SEQ ID NO: 201 - protein, 255 aa, Homo sapiens; identical to SEQ ID NO: 114

SEQ ID NO: 202 - protein, 203 aa, Homo sapiens; identical to SEQ ID NO: 105

SEQ ID NO: 203 - protein, 150 aa, Homo sapiens; identical to SEQ ID NO: 115

SEQ ID NO: 204 - protein, 159 aa, Homo sapiens; identical to SEQ ID NO: 106

SEQ ID NO: 205 - protein, 158 aa, Homo sapiens; identical to SEQ ID NO: 116

SEQ ID NO: 206 - protein, 475 aa, Homo sapiens; identical to SEQ ID NO: 107

SEQ ID NO: 207 - protein, 484 aa, Homo sapiens; identical to SEQ ID NO: 117

SEQ ID NO: 208 - protein, 282 aa, Homo sapiens; identical to SEQ ID NO: 108

SEQ ID NO: 209 - protein, 219 aa, Homo sapiens; identical to SEQ ID NO: 118

SEQ ID NO: 210 - protein, 238 aa, Homo sapiens; identical to SEQ ID NO: 109

SEQ ID NO: 211 - protein, 217 aa, Homo sapiens; identical to SEQ ID NO: 119

SEQ ID NO: 212 - protein, 241 aa, Homo sapiens; identical to SEQ ID NO: 110

SEQ ID NO: 213 - protein, 239 aa, Homo sapiens; identical to SEQ ID NO: 120

SEQ ID NO: 214 - protein, 198 aa, Homo sapiens; identical to SEQ ID NO: 111

SEQ ID NO: 215 - protein, 230 aa, Homo sapiens; identical to SEQ ID NO: 121

SEQ ID NO: 216 - protein, 189 aa, Homo sapiens; identical to SEQ ID NO: 112

SEQ ID NO: 217 - protein, 212 aa, Homo sapiens; identical to SEQ ID NO: 122

SEQ ID NO: 218 - protein, 177 aa, Homo sapiens; identical to SEQ ID NO: 113

SEQ ID NO: 219 - protein, 273 aa, Homo sapiens; identical to SEQ ID NO: 123

SEQ ID NO: 220 - protein, 216 aa, Homo sapiens
MGWIRGRRSRHSWEMSEFHNYNLDLKKSDFSTRWQKQRCPVVKSKCRENASPFFFCCFIAVAMGIRFIIMVTIWSAVFLNSLFNQEVQIPLTESYCGPCPKNWICYKNNCYQFFDESKNWYESQASCMSQNASLLKVYSKEDQDLLKLVKSYHWMGLVHIPTNGSWQWEDGSILSPNLLTIIEMQKGDCALYASSFKGYIENCSTPNTYICMQRTV

SEQ ID NO: 221 - protein, 420 aa, Homo sapiens
MPGGCSRGPAAGDGRLRLARLALVLLGWVSSSSPTSSASSFSSSAPFLASAVSAQPPLPDQCPALCECSEAARTVKCVNRNLTEVPTDLPAYVRNLFLTGNQLAVLPAGAFARRPPLAELAALNLSGSRLDEVRAGAFEHLPSLRQLDLSHNPLADLSPFAFSGSNASVSAPSPLVELILNHIVPPEDERQNRSFEGMVVAALLAGRALQGLRRLELASNHFLYLPRDVLAQLPSLRHLDLSNNSLVSLTYVSFRNLTHLESLHLEDNALKVLHNGTLAELQGLPHIRVFLDNNPWVCDCHMADMVTWLKETEVVQGKDRLTCAYPEKMRNRVLLELNSADLDCDPILPPSLQTSYVFLGIVLALIGAIFLLVLYLNRKGIKKWMHNIRDACRDHMEGYHYRYEINADPRLTNLSSNSDV

SEQ ID NO: 222 - protein, 420 aa, Homo sapiens; identical to SEQ ID NO: 221

SEQ ID NO: 223 - protein, 114 aa, Homo sapiens; identical to SEQ ID NO: 98

SEQ ID NO: 224 - protein, 719 aa, Homo sapiens
MWNLLHETDSAVATARRPRWLCAGALVLAGGFFLLGFLFGWFIKSSNEATNITPKHNMKAFLDELKAENIKKFLYNFTQIPHLAGTEQNFQLAKQIQSQWKEFGLDSVELAHYDVLLSYPNKTHPNYISIINEDGNEIFNTSLFEPPPPGYENVSDIVPPFSAFSPQGMPEGDLVYVNYARTEDFFKLERDMKINCSGKIVIARYGKVFRGNKVKNAQLAGAKGVILYSDPADYFAPGVKSYPDGWNLPGGGVQRGNILNLNGAGDPLTPGYPANEYAYRRGIAEAVGLPSIPVHPIGYYDAQKLLEKMGGSAPPDSSWRGSLKVPYNVGPGFTGNFSTQKVKMHIHSTNEVTRIYNVIGTLRGAVEPDRYVILGGHRDSWVFGGIDPQSGAAVVHEIVRSFGTLKKEGWRPRRTILFASWDAEEFGLLGSTEWAEENSRLLQERGVAYINADSSIEGNYTLRVDCTPLMYSLVHNLTKELKSPDEGFEGKSLYESWTKKSPSPEFSGMPRISKLGSGNDFEVFFQRLGIASGRARYTKNWETNKFSGYPLYHSVYETYELVEKFYDPMFKYHLTVAQVRGGMVFELANSIVLPFDCRDYAVVLRKYADKIYSISMKHPQEMKTYSVSFDSLFSAVKNFTEIASKFSERLQDFDKSKHVIYAPSSHNKYAGESFPGIYDALFDIESKVDPSKAWGEVKRQIYVAAFTVQAAAETLSEVA

SEQ ID NO: 225 - protein, 735 aa, Homo sapiens
MTAGSSYPLFLAAYACTGCLAERLGWFIKSSNEATNITPKHNMKAFLDELKAENIKKFLYNFTQIPHLAGTEQNFQLAKQIQSQWKEFGLDSVELAHYDVLLSYPNKTHPNYISIINEDGNEIFNTSLFEPPPPGYENVSDIVPPFSAFSPQGMPEGDLVYVNYARTEDFFKLERDMKINCSGKIVIARYGKVFRGNKVKNAQLAGAKGVILYSDPADYFAPGVKSYPDGWNLPGGGVQRGNILNLNGAGDPLTPGYPANEYAYRRGIAEAVGLPSIPVHPIGYYDAQKLLEKMGGSAPPDSSWRGSLKVPYNVGPGFTGNFSTQKVKMHIHSTNEVTRIYNVIGTLRGAVEPDRYVILGGHRDSWVFGGIDPQSGAAVVHEIVRSFGTLKKEGWRPRRTILFASWDAEEFGLLGSTEWAEENSRLLQERGVAYINADSSIEGNYTLRVDCTPLMYSLVHNLTKELKSPDEGFEGKSLYESWTKKSPSPEFSGMPRISKLGSGNDFEVFFQRLGIASGRARYTKNWETNKFSGYPLYHSVYETYELVEKFYDPMFKYHLTVAQVRGGMVFELANSIVLPFDCRDYAVVLRKYADKIYSISMKHPQEMKTYSVSFDSLFSAVKNFTEIASKFSERLQDFDKSNPIVLRMMNDQLMFLERAFIDPLGLPDRPFYRHVIYAPSSHNKYAGESFPGIYDALFDIESKVDPSKAWGEVKRQIYVAAFTVQAAAETLSEVA

SEQ ID NO: 226 - protein, 704 aa, Homo sapiens
MTAGSSYPLFLAAYACTGCLAERLGWFIKSSNEATNITPKHNMKAFLDELKAENIKKFLYNFTQIPHLAGTEQNFQLAKQIQSQWKEFGLDSVELAHYDVLLSYPNKTHPNYISIINEDGNEIFNTSLFEPPPPGYENVSDIVPPFSAFSPQGMPEGDLVYVNYARTEDFFKLERDMKINCSGKIVIARYGKVFRGNKVKNAQLAGAKGVILYSDPADYFAPGVKSYPDGWNLPGGGVQRGNILNLNGAGDPLTPGYPANEYAYRRGIAEAVGLPSIPVHPIGYYDAQKLLEKMGGSAPPDSSWRGSLKVPYNVGPGFTGNFSTQKVKMHIHSTNEVTRIYNVIGTLRGAVEPDRYVILGGHRDSWVFGGIDPQSGAAVVHEIVRSFGTLKKEGWRPRRTILFASWDAEEFGLLGSTEWAEENSRLLQERGVAYINADSSIEGNYTLRVDCTPLMYSLVHNLTKELKSPDEGFEGKSLYESWTKKSPSPEFSGMPRISKLGSGNDFEVFFQRLGIASGRARYTKNWETNKFSGYPLYHSVYETYELVEKFYDPMFKYHLTVAQVRGGMVFELANSIVLPFDCRDYAVVLRKYADKIYSISMKHPQEMKTYSVSFDSLFSAVKNFTEIASKFSERLQDFDKSKHVIYAPSSHNKYAGESFPGIYDALFDIESKVDPSKAWGEVKRQIYVAAFTVQAAAETLSEVA

SEQ ID NO: 227 - protein, 442 aa, Homo sapiens
MGGSAPPDSSWRGSLKVPYNVGPGFTGNFSTQKVKMHIHSTNEVTRIYNVIGTLRGAVEPDRYVILGGHRDSWVFGGIDPQSGAAVVHEIVRSFGTLKKEGWRPRRTILFASWDAEEFGLLGSTEWAEENSRLLQERGVAYINADSSIEGNYTLRVDCTPLMYSLVHNLTKELKSPDEGFEGKSLYESWTKKSPSPEFSGMPRISKLGSGNDFEVFFQRLGIASGRARYTKNWETNKFSGYPLYHSVYETYELVEKFYDPMFKYHLTVAQVRGGMVFELANSIVLPFDCRDYAVVLRKYADKIYSISMKHPQEMKTYSVSFDSLFSAVKNFTEIASKFSERLQDFDKSNPIVLRMMNDQLMFLERAFIDPLGLPDRPFYRHVIYAPSSHNKYAGESFPGIYDALFDIESKVDPSKAWGEVKRQIYVAAFTVQAAAETLSEVA

SEQ ID NO: 228 - protein, 750 aa, Homo sapiens
MWNLLHETDSAVATARRPRWLCAGALVLAGGFFLLGFLFGWFIKSSNEATNITPKHNMKAFLDELKAENIKKFLYNFTQIPHLAGTEQNFQLAKQIQSQWKEFGLDSVELAHYDVLLSYPNKTHPNYISIINEDGNEIFNTSLFEPPPPGYENVSDIVPPFSAFSPQGMPEGDLVYVNYARTEDFFKLERDMKINCSGKIVIARYGKVFRGNKVKNAQLAGAKGVILYSDPADYFAPGVKSYPDGWNLPGGGVQRGNILNLNGAGDPLTPGYPANEYAYRRGIAEAVGLPSIPVHPIGYYDAQKLLEKMGGSAPPDSSWRGSLKVPYNVGPGFTGNFSTQKVKMHIHSTNEVTRIYNVIGTLRGAVEPDRYVILGGHRDSWVFGGIDPQSGAAVVHEIVRSFGTLKKEGWRPRRTILFASWDAEEFGLLGSTEWAEENSRLLQERGVAYINADSSIEGNYTLRVDCTPLMYSLVHNLTKELKSPDEGFEGKSLYESWTKKSPSPEFSGMPRISKLGSGNDFEVFFQRLGIASGRARYTKNWETNKFSGYPLYHSVYETYELVEKFYDPMFKYHLTVAQVRGGMVFELANSIVLPFDCRDYAVVLRKYADKIYSISMKHPQEMKTYSVSFDSLFSAVKNFTEIASKFSERLQDFDKSNPIVLRMMNDQLMFLERAFIDPLGLPDRPFYRHVIYAPSSHNKYAGESFPGIYDALFDIESKVDPSKAWGEVKRQIYVAAFTVQAAAETLSEVA

SEQ ID NO: 229 - protein, 9 aa, Artificial sequence
  Amino acid sequence encoding Gag 77-85
SLYNTVATL

SEQ ID NO: 230 - protein, 8 aa, Artificial sequence
  Amino acid sequence encoding Pol 476-484
ILEPVHGV

SEQ ID NO: 231 - protein, 9 aa, Artificial sequence
  Amino acid sequence encoding a short peptide
GILGFVFTL

SEQ ID NO: 232 - protein, 252 aa, Influenza virus
MSLLTEVETYVLSIVPSGPLKAEIAQRLEDVFAGKNTDLEALMEWLKTRPILSPLTKGILGFVFTLTVPSERGLQRRRFVQNALNGNGDPNNMDRAVKLYRKLKREITFHGAKEVALSYSAGALASCMGLIYNRMGAVTTEVAFAVVCATCEQIADSQHRSHRQMVTTTNPLIRHENRMVLASTTAKAMEQMAGSSEQAAEAMEVASQARQMVQAMRAIGTPPSSSAGLKDDLLENLQAYQKRMGVQMQRFK

SEQ ID NO: 233 - protein, 584 aa, Influenza virus
MKAIIVLLMVVTSNADRICTGITSSNSPHVVKTATQGEVNVTGVIPLTTTPTKSHFANLKGTQTRGKLCPNCFNCTDLDVALGRPKCMGNTPSAKVSILHEVKPATSGCFPIMHDRTKIRQLPNLLRGYENIRLSTSNVINTETAPGGPYKVGTSGSCPNVANGNGFFNTMAWVIPKDNNKTAINPVTVEVPYICSEGEDQITVWGFHSDDKTQMERLYGDSNPQKFTSSANGVTTHYVSQIGGFPNQTEDEGLKQSGRIVVDYMVQKPGKTGTIVYQRGILLPQKVWCASGRSKVIKGSLPLIGEADCLHEKYGGLNKSKPYYTGEHAKAIGNCPIWVKTPLKLANGTKYRPPAKLLKERGFFGAIAGFLEGGWEGMIAGWHGYTSHGAHGVAVAADLKSTQEAINKITKNLNYLSELEVKNLQRLSGAMNELHDEILELDEKVDDLRADTISSQIELAVLLSNEGIINSEDEHLLALERKLKKMLGPSAVEIGNGCFETKHKCNQTCLDRIAAGTFNAGDFSLPTFDSLNITAASLNDDGLDNHTILLYYSTAASSLAVTLMIAIFIVYMVSRDNVSCSICL

SEQ ID NO: 234 - protein, 566 aa, Influenza virus
MKTIIALSYILCLVFAQKLPGNDNSTATLCLGHHAVPNGTIVKTITNDQIEVTNATELVQSSSTGGICDSPHQILDGENCTLIDALLGDPQCDGFQNKKWDLFVERSKAYSNCYPYDVPDYASLRSLVASSGTLEFNNESFNWTGVTQNGTSSACKRRSNNSFFSRLNWLTHLKFKYPALNVTMPNNEKFDKLYIWGVHHPGTDNDQISLYAQASGRITVSTKRSQQTVIPSIGSRPRIRDVPSRISIYWTIVKPGDILLINSTGNLIAPRGYFKIRSGKSSIMRSDAPIGKCNSECITPNGSIPNDKPFQNVNRITYGACPRYVKQNTLKLATGMRNVPEKQTRGIFGAIAGFIENGWEGMVDGWYGFRHQNSEGTGQAADLKSTQAAINQINGKLNRLIGKTNEKFHQIEKEFSEVEGRIQDLEKYVEDTKIDLWSYNAELLVALENQHTIDLTDSEMNKLFERTKKQLRENAEDMGNGCFKIYHKCDNACIGSIRNGTYDHDVYRDEALNNRFQIKGVELKSGYKDWILWISFAISCFLLCVALLGFIMWACQKGNIRCNICI

SEQ ID NO: 235 - protein, 466 aa, Influenza virus
MLPSTVQTLTLLLTSGGVLLSLYVSASLSYLLYSDVLLKFSSTKTTAPTMSLECTNASNAQTVNHSATKEMTFPPPEPEWTYPRLSCQGSTFQKALLISPHRFGEIKGNSAPLIIREPFVACGPKECRHFALTHYAAQPGGYYNGTRKDRNKLRHLVSVKLGKIPTVENSIFHMAAWSGSACHDGREWTYIGVDGPDNDALVKIKYGEAYTDTYHSYAHNILRTQESACNCIGGDCYLMITDGSASGISKCRFLKIREGRIIKEILPTGRVEHTEECTCGFASNKTIECACRDNSYTAKRPFVKLNVETDTAEIRLMCTKTYLDTPRPDDGSIAGPCESNGDKWLGGIKGGFVHQRMASKIGRWYSRTMSKTNRMGMELYVKYDGDPWTDSDALTLSGVMVSIEEPGWYSFGFEIKDKKCDVPCIGIEMVHDGGKDTWHSAATAIYCLMGSGQLLWDTVTGVDMAL

SEQ ID NO: 236 - protein, 565 aa, Influenza virus
MSDRRQNRKTPDEQRKANALIINENIEAYIAICKEVGLNGDEMLILENGIAIEKAIRICCDGKYQEKREKKAREAQRADSNFNADSIGIRLVKRAGSGTNITYHAVVELTSRSRIVQILKSHWGNELNRAKIAGKRLGFSALFASNLEAIIYQRGRNAARRNGSAELFTLTQGAGIETRYKWIMEKHIGIGVLIADAKGLINGKREGKRGVDANVKLRAGTTGSPLERAMQGIEKKAFPGPLRALARRVVKANYNDAREALNVIAEASLLLKPQITNKMTMPWCMWLAARLTLKDEFANFCAYAGRRAFEVFNIAMEKIGICSFQGTIMNDDEIESIEDKAQVLMMACFGLAYEDFSLVSAMVSHPLKLRNRMKIGNFRVGEKVSTVLSPLLRFTRWAEFAQRFALQANTSREGAQISNSAVFAVERKITTDVQRVEELLNKVQAHEDEPLQTLYKKVREQISIIGRNKSEIKEFLGSSMYDLNDQEKQNPINFRSGAHPFFFEFDPDYNPIRVKRPKKPIAKRNSNISRLEEEGMDENSEIGQAKKMKPLDQLTSTSSNIPGKN

SEQ ID NO: 237 - protein, 498 aa, Influenza virus
MASQGTKRSYEQMETDGERQNATEIRASVGKMIDGIGRFYIQMCTELKLSDYEGRLIQNSLTIERMVLSAFDERRNKYLEEHPSAGKDPKKTGGPIYKRVDGKWMRELVLYDKEEIRRIWRQANNGDDATAGLTHMMIWHSNLNDTTYQRTRALVRTGMDPRMCSLMQGSTLPRRSGAAGAAVKGVGTMVMELIRMIKRGINDRNFWRGENGRKTRSAYERMCNILKGKFQTAAQRAMMDQVRESRNPGNAEIEDLIFLARSALILRGSVAHKSCLPACVYGPAIASGYNFEKEGYSLVGIDPFKLLQNSQVYSLIRPNENPAHKSQLVWMACNSAAFEDLRVLSFIRGTKVSPRGKLSTRGVQIASNENMDTMESSTLELRSRYWAIRTRSGGNTNQQRASAGQISVQPAFSVQRNLPFDKPTIMAAFTGNTEGRTSDMRAEIIRMMEGAKPEEMSFQGRGVFELSDEKATNPIVPSFDMSNEGSYFFGDNAEEYDN

SEQ ID NO: 238 - protein, 498 aa, Influenza virus
MASQGTKRSYEQMETGGERQNATEIRASVGRMVGGIGRFYVQMCTELKLSDQEGRLIQNSITIERMVLSAFDERRNRYLEEHPSAGKDPKKTGGPIYRRRDGKWVRELILYDKEEIRRIWRQANNGEDATAGLTHMMIWHSNLNDATYQRTRALVRTGMDPRMCSLMQGSTLPRRSGAAGAAIKGVGTMVMELIRMIKRGINDRNFWRGDNGRRTRIAYERMCNILKGKFQTAAQRAMMDQVRESRNPGNAEIEDLIFLARSALILRGSVAHKSCLPACVYGLAVASGYDFEREGYSLVGIDPFRLLQNSQVFSLIRPNENPAHKSQLVWMACHSAAFEDLRVSSFIRGTRVIPRGQLSTRGVQIASNENVEAMDSSTLELRSRYWAIRTRSGGNTNQQRASAGQISVQPTFSVQRNLPFERPTIMAAFKGNTEGRTSDMRTEIIRMMESARPEDVSFQGRGVFELSDEKATNPIVPSFDMSNEGSYFFGDNAEEYDN

SEQ ID NO: 239 - protein, 560 aa, Influenza virus
MSNMDIDSINTGTIDKTPEELTPGTSGATRPIIKPATLAPPSNKRTRNPSPERTTTSSETDIGRKIQKKQTPTEIKKSVYKMVVKLGEFYNQMMVKAGLNDDMERNLIQNAQAVERILLAATDDKKTEYQKKRNARDVKEGKEEIDHNKTGGTFYKMVRDDKTIYFSPIKITFLKEEVKTMYKTTMGSDGFSGLNHIMIGHSQMNDVCFQRSKGLKRVGLDPSLISTFAGSTLPRRSGTTGVAIKGGGTLVDEAIRFIGRAMADRGLLRDIKAKTAYEKILLNLKNKCSAPQQKALVDQVIGSRNPGIADIEDLTLLARSMVVVRPSVASKVVLPISIYAKIPQLGFNTEEYSMVGYEAMALYNMATPVSILRMGDDAKDKSQLFFMSCFGAAYEDLRVLSALTGTEFKPRSALKCKGFHVPAKEQVEGMGAALMSIKLQFWAPMTRSGGNEVSGEGGSGQISCSPVFAVERPIALSKQAVRRMLSMNVEGRDADVKGNLLKMMNDSMAKKTSGNAFIGKKMFQISDKNKVNPIEIPIKQTIPNFFFGRDTAEDYDDLDY

SEQ ID NO: 240 - protein, 248 aa, Influenza virus
MSLFGDTIAYLLSLIEDGEGKAELAEKLHCWFGGKEFDLDSALEWIKNKRCLTDIQKALIGASICFLKPKDQERKRRFITEPLSGMGTTATKKKGLILAERKMRRCVSFHEAFEIAEGHESSALLYCLMVMYLNPENYSMQVKLGTLCALCEKQASHSHRAHSRAARSSVPGVRREMQMVSAMNTAKTMNGMGKGEDVQKLAEELQNNIGVLRSLGASQKNGEGIAKDVMEVLKQSSMGNSALVRKYL

SEQ ID NO: 241 - protein, 97 aa, Influenza virus
MSLLTEVETPIRNEWGCRCNGSSDPLAIAANIIGILHLILWILDRLFFKCIYRRFKYGLKGGPSTEGVPKSMREEYRKEQQSAVDADDGHFVSIELE

SEQ ID NO: 242 - protein, 281 aa, Influenza virus
MADNMTTTQIEVGPGATNATINFEAGILECYERFSWQRALDYPGQDRLHRLKRKLESRIKTHNKSEPENKRMSLEERKAIGVKMMKVLLFMDPSAGIEGFEPYCVKNPSTSKCPNYDWTDYPPTPGKYLDDIEEEPENVDHPIEVVLRDMNNKDARQKIKDEVNTQKEGKFRLTIKRDIRNVLSLRVLVNGTFLKHPNGDKSLSTLHRLNAYDQNGGLVAKLVATDDRTVEDEKDGHRILNSLFERFDEGHSKPIRAAETAVGVLSQFGQEHRLSPEEGDN

SEQ ID NO: 243 - protein, 122 aa, Influenza virus
MADNMTTTQIEWRMKKMAIGSSTHSSSVLMKDIQSQFEQLKLRWESYPNLVKSTDYHQKRETIRLATEELYLLSKRIDDSILFHKTVIANSSIIADMIVSLSLLETLYEMKDVVEVYSRQCL

SEQ ID NO: 244 - protein, 716 aa, Influenza virus
MEDFVRQCFNPMIVELAEKAMKEYGEDLKIETNKFAAICTHLEVCFMYSDFHFINEQGESIIVEPEDPNALLKHRFEIIEGRDRTMAWTVVNSICNTTGAEKPKFLPDLYDYKENRFIEIGVTRREVHIYYLEKANKIKSEKTHIHIFSFTGEEMATKADYTLDEESRARIKTRLFTIRQEMASRGLWDSFRQSERGEETIEERFEITGTMRRLADQSLPPNFSCLENFRAYVDGFEPNGYIEGKLSQMSKEVNARIEPFLRTTPRPIRLPDGPPCFQRSKFLLMDSLKLSIEDPSHEGEGIPLYDAIKCMRTFFGWKEPSVVKPHGKGINPNYLLSWKQVLAELQDIESEEKIPRTKNMKKTSQLKWALGENMAPEKVDFDDCKDISDLKQYDSDEPELRSLSSWIQNEFNKACELTDSIWIELDEIGEDVAPIEHIASMRRNYFTAEVSHCRATEYIMKGVYINTALLNASCAAMDDFQLIPMISKCRTKEGRRKTNLYGFIIKGRSHLRNDTDVVNFVSMEFSLTDPRLEPHKWEKYCVLEIGDMLLRSAIGQVSRPMFLYVRTNGTSKIKMKWGMEMRRCLLQSLQQIESMIEAESSVKEKDMTKEFFENRSETWPIGESPKGVEEGSIGKVCRTLLAKSVFNSLYASPQLEGFSAESRKLLLIVQALRDNLEPGTFDLGGLYEAIEECLINDPWVLLNASWFNSFLTHALR

SEQ ID NO: 245 - protein, 752 aa, Influenza virus
MNINPYFLFIDVPIQAAISTTFPYTGVPPYSHGTGTGYTIDTVIRTHEYSNKGKQYISDVTGCVMVDPTNGPLPEDNEPSAYAQLDCVLEALDRMDEEHPGLFQAGSQNAMEALMVTTVDKLTQGRQTFDWTVCRNQPAATALNTTITSFRLNDLNGADKGGLVPFCQDIIDSLDKPEMIFFTVKNIKKKLPAKNRKGFLIKRIPMKVKDRITRVEYIKRALSLNTMTKDAERGKLKRRAIATAGIQIRGFVLVVENLAKNICENLEQSGLPVGGNEKKAKLSNAVAKMLSNCPPGGISMTVTGDNTKWNECLNPRIFLAMTERITRDSPIWFRDFCSIAPVLFSNKIARLGKGFMITSKTKRLKAQIPCPDLFNIPLERYNEETRAKLKKLKPFFNEEGTASLSPGMMMGMFNMLSTVLGVAALGIKNIGNKEYLWDGLQSSDDFALFVNAKDEETCMEGINDFYRTCKLLGINMSKKKSYCNETGMFEFTSMFYRDGFVSNFAMELPSFGVAGVNESADMAIGMTIIKNNMINNGMGPATAQTAIQLFIADYRYTYKCHRGDSKVEGKRMKIIKELWENTKGRDGLLVADGGPNLYNLRNLHIPEIILKYNIMDPEYKGRLLHPQNPFVGHLSIEGIKEADITPAHGPIKKMDYDAVSGTHSWRTKRNRSILNTDQRNMILEEQCYAKCCNLFEACFNSASYRKPVGQHSMLEAMAHRLRMDARLDYESGRMSKEDFEKAMAHLGEIGYM

SEQ ID NO: 246 - protein, 759 aa, Influenza virus
MERIKELRNLMSQSRTREILTKTTVDHMAIIKKYTSGRQEKNPALRMKWMMAMKYPITADKRITEMIPERNEQGQTLWSKMNDAGSDRVMVSPLAVTWWNRNGPMTNTVHYPKIYKTYFERVERLKHGTFGPVHFRNQVKIRRRVDINPGHADLSAKEAQDVIMEVVFPNEVGARILTSESQLTITKEKKEELQDCKISPLMVAYMLERELVRKTRFLPVAGGTSSVYIEVLHLTQGTCWEQMYTPGGEVKNDDVDQSLIIAARNIVRRAAVSADPLASLLEMCHSTQIGGIRMVDILKQNPTEEQAVGICKAAMGLRISSSFSFGGFTFKRTSGSSVKREEEVLTGNLQTLKIRVHEGYEEFTMVGRRATAILRKATRRLIQLIVSGRDEQSIAEAIIVAMVFSQEDCMIKAVRGDLNFVNRANQRLNPMHQLLRHFQKDAKVLFQNWGVEPIDNVMGMIGILPDMTPSIEMSMRGVRISKMGVDEYSSTERVVVSIDRFLRVRDQRGNVLLSPEEVSETQGTEKLTITYSSSMMWEINGPESVLVNTYQWIIRNWETVKIQWSQNPTMLYNKMEFEPFQSLVPKAIRGQYSGFVRTLFQQMRDVLGTFDTAQIIKLLPFAAAPPKQSRMQFSSFTVNVRGSGMRILVRGNSPVFNYNKATKRLTVLGKDAGTLTEDPDEGTAGVESAVLRGFLILGKEDRRYGPALSINELSNLAKGEKANVLIGQGDVVLVMKRKRDSSILTDSQTATKRIRMAIN

SEQ ID NO: 247 - protein, 109 aa, Influenza virus
MLEPLQILSICSFILSALHFMAWTIGHLNQIKRGVNLKIQIRNPNKEAINREVSILRHNYQKEIQAKETMKKILSDNMEVLGDHIVVEGLSTDEIIKMGETVLEVEELQ

SEQ ID NO: 248 - protein, 100 aa, Influenza virus
MNNATFNCTNINPITHIRGSIIITICVSLIVILIVFGCIAKIFINKNNCTNNVIRVHKRIKCPDCEPFCNKRDDISTPRAGVDIPSFILPGLNLSEGTPN

SEQ ID NO: 249 - protein, 498 aa, Influenza virus
MASQGTKRSYEQMETDGERQNATEIRASVGKMIGGIGRFYIQMCTELKLSDYEGRLIQNSLTIERMVLSAFDERRNKYLEEHPSAGKDPKKTGGPIYRRVNGKWMRELILYDKEEIRRIWRQANNGDDATAGLTHMMIWHSNLNDATYQRTRALVRTGMDPRMCSLMQGSTLPRRSGAAGAAVKGVGTMVMELVRMIKRGINDRNFWRGENGRKTRIAYERMCNILKGKFQTAAQKAMMDQVRESRDPGNAEFEDLTFLARSALILRGSVAHKSCLPACVYGPAVASGYDFEREGYSLVGIDPFRLLQNSQVYSLIRPNENPAHKSQLVWMACHSAAFEDLRVLSFIKGTKVVPRGKLSTRGVQIASNENMETMESSTLELRSRYWAIRTRSGGNTNQQRASAGQISIQPTFSVQRNLPFDRTTVMAAFTGNTEGRTSDMRTEIIRMMESARPEDVSFQGRGVFELSDEKAASPIVPSFDMSNEGSYFFGDNAEEYDN

SEQ ID NO: 250 - protein, 551 aa, Human herpesvirus 5
MASVLGPISGHVLKAVFSRGDTPVLPHETRLLQTGIHVRVSQPSLILVSQYTPDSTPCHRGDNQLQVQHTYFTGSEVENVSVNVHNPTGRSICPSQEPMSIYVYALPLKMLNIPSINVHHYPSAAERKHRHLPVADAVIHASGKQMWQARLTVSGLAWTRQQNQWKEPDVYYTSAFVFPTKDVALRHVVCAHELVCSMENTRATKMQVIGDQYVKVYLESFCEDVPSGKLFMHVTLGSDVEEDLTMTRNPQPFMRPHERNGFTVLCPKNMIIKPGKISHIMLDVAFTSHEHFGLLCPKSIPGLSISGNLLMNGQQIFLEVQAIRETVELRQYDPVAALFFFDIDLLLQRGPQYSEHPTFTSQYRIQGKLEYRHTWDRHDEGAAQGDDDVWTSGSDSDEELVTTERKTPRVTGGGAMAGASTSAGRKRKSASSATACTAGVMTRGRLKAESTVAPEEDTDEDSDNEIHNPAVFTWPPWQAGILARNLVPMVATVQGQNLKYQEFFWDANDIYRIFAELEGVWQPAAQPKRRRHRQDALPGPCIASTPKKHRG

SEQ ID NO: 251 - protein, 551 aa, Human herpesvirus 5; identical to SEQ ID NO: 250

SEQ ID NO: 252 - protein, 9 aa, Hepatitis B virus
  MISC_FEATURE: Amino acid sequence encoding HBV pre-S protein 85-66
STNRQSGRQ

SEQ ID NO: 253 - protein, 9 aa, Human T-cell lymphotropic virus 1
  MISC_FEATURE: HTLV-1 tax 11-19
LLFGYPVYV

SEQ ID NO: 254 - protein, 10 aa, Hepatitis B virus
  MISC_FEATURE: HBV surface antigen 185-194
GLSPTVWLSV

SEQ ID NO: 255 - protein, 13 aa, Artificial sequence
  Autoantigenic peptide
MNILLQYVVKSFD

SEQ ID NO: 256 - protein, 9 aa, Artificial sequence
  Autoantigenic peptide
IAPVFVLLE

SEQ ID NO: 257 - protein, 14 aa, Artificial sequence
  Autoantigenic peptide
LPRLIAFTSEHSHF

SEQ ID NO: 258 - protein, 13 aa, Artificial sequence
  Autoantigenic peptide
IAFTSEHSHFSLK

SEQ ID NO: 259 - protein, 14 aa, Artificial sequence
  Autoantigenic peptide
TVYGAFDPLLAVAD

SEQ ID NO: 260 - protein, 15 aa, Artificial sequence
  Autoantigenic peptide
KYKIWMHVDAAWGGG

SEQ ID NO: 261 - protein, 15 aa, Artificial sequence
  Autoantigenic peptide
KHKWKLSGVERANSV

SEQ ID NO: 262 - protein, 15 aa, Artificial sequence
  Autoantigenic peptide
LYNIIKNREGYEMVF

SEQ ID NO: 263 - protein, 15 aa, Artificial sequence
  Autoantigenic peptide
PSLRTLEDNEERMSR

SEQ ID NO: 264 - protein, 15 aa, Artificial sequence
  Autoantigenic peptide
RMMEYGTTMVSYQPL

SEQ ID NO: 265 - protein, 15 aa, Artificial sequence
  Autoantigenic peptide
SYQPLGDKVNFFRMV

SEQ ID NO: 266 - protein, 13 aa, Artificial sequence
  Autoantigenic peptide
NFFRMVISNPAAT

SEQ ID NO: 267 - protein, 15 aa, Artificial sequence
  Autoantigenic peptide
ATHQDIDFLIEEIER

SEQ ID NO: 268 - protein, 9 aa, Artificial sequence
  Autoantigenic peptide
ATDLLPACD

SEQ ID NO: 269 - protein, 15 aa, Artificial sequence
  Autoantigenic peptide
FDRSTKVIDFHYPNE

SEQ ID NO: 270 - protein, 9 aa, Artificial sequence
  Autoantigenic peptide
ELLQEYNWE

SEQ ID NO: 271 - protein, 9 aa, Artificial sequence
  Autoantigenic peptide
EYNWELADQ

SEQ ID NO: 272 - protein, 9 aa, Artificial sequence
  Autoantigenic peptide
DIDFLIEEI

SEQ ID NO: 273 - protein, 15 aa, Artificial sequence
  Autoantigenic peptide
TGHPRYFNQLSTGLD

SEQ ID NO: 274 - protein, 15 aa, Artificial sequence
  Autoantigenic peptide
TYEIAPVFVLLEYVT

SEQ ID NO: 275 - protein, 9 aa, Artificial sequence
  Autoantigenic peptide
YVTLKKMRE

SEQ ID NO: 276 - protein, 20 aa, Artificial sequence
  Autoantigenic peptide
PGGSGDGIFSPGGAISNMYA

SEQ ID NO: 277 - protein, 20 aa, Artificial sequence
  Autoantigenic peptide
NMYAMMIARFKMFPEVKEKG

SEQ ID NO: 278 - protein, 20 aa, Artificial sequence
  Autoantigenic peptide
PEVKEKGMAALPRLIAFTSE

SEQ ID NO: 279 - protein, 9 aa, Artificial sequence
  Autoantigenic peptide
DSVILIKCD

SEQ ID NO: 280 - protein, 9 aa, Artificial sequence
  Autoantigenic peptide
GKMIPSDLE

SEQ ID NO: 281 - protein, 9 aa, Artificial sequence
  Autoantigenic peptide
ERRILEAKQ

SEQ ID NO: 282 - protein, 9 aa, Artificial sequence
  Autoantigenic peptide
ERANSVTWN

SEQ ID NO: 283 - protein, 9 aa, Artificial sequence
  Autoantigenic peptide
QCSALLVRE

SEQ ID NO: 284 - protein, 15 aa, Artificial sequence
  Autoantigenic peptide
KHYDLSYDTGDKALQ

SEQ ID NO: 285 - protein, 15 aa, Artificial sequence
  Autoantigenic peptide
AKGTTGFEAHVDKCL

SEQ ID NO: 286 - protein, 20 aa, Artificial sequence
  Autoantigenic peptide
VDKCLELAEYLYNIIKNREG

SEQ ID NO: 287 - protein, 9 aa, Artificial sequence
  Autoantigenic peptide
IIKNREGYE

SEQ ID NO: 288 - protein, 15 aa, Artificial sequence
  Autoantigenic peptide
MVFDGKPQHTNVCFW

SEQ ID NO: 289 - protein, 15 aa, Artificial sequence
  Autoantigenic peptide
CFWYIPPSLRTLEDN

SEQ ID NO: 290 - protein, 13 aa, Artificial sequence
  Autoantigenic peptide
FWYIPPSLRTLED

SEQ ID NO: 291 - protein, 9 aa, Artificial sequence
  Autoantigenic peptide
SLRTLEDNE

SEQ ID NO: 292 - protein, 15 aa, Artificial sequence
  Autoantigenic peptide
ERMSRLSKVAPVIKA

SEQ ID NO: 293 - protein, 15 aa, Artificial sequence
  Autoantigenic peptide
IKARMMEYGTTMVSY

SEQ ID NO: 294 - protein, 15 aa, Artificial sequence
  Autoantigenic peptide
RMMEYGTTMVSYQPL

SEQ ID NO: 295 - protein, 9 aa, Artificial sequence
  Autoantigenic peptide
VISNPAATH

SEQ ID NO: 296 - protein, 9 aa, Artificial sequence
  Autoantigenic peptide
IDFLIEEIE

SEQ ID NO: 297 - protein, 20 aa, Artificial sequence
  Autoantigenic peptide
NWELADQPQNLEEILMHCQT

SEQ ID NO: 298 - protein, 12 aa, Artificial sequence
  Autoantigenic peptide
GHPRYFNQLSTG

SEQ ID NO: 299 - protein, 20 aa, Artificial sequence [sequence omitted]

SEQ ID NO: 300 - protein, 17 aa, Artificial sequence
  Autoantigenic peptide
VNFFRMVISNPAATHQD

SEQ ID NO: 301 - protein, 21 aa, Artificial sequence
  Autoantigenic peptide
DKVNFFRMVISNPAATHQDID

SEQ ID NO: 302 - protein, 10 aa, Artificial sequence
  Autoantigenic peptide
FFRMVISNPA

SEQ ID NO: 303 - protein, 14 aa, Artificial sequence
  Autoantigenic peptide
LTIQIESAADQDPS

SEQ ID NO: 304 - protein, 14 aa, Artificial sequence
  Autoantigenic peptide
RTGIAQALSSFDLH

SEQ ID NO: 305 - protein, 14 aa, Artificial sequence
  Autoantigenic peptide
LYPDYQIQAGIMIT

SEQ ID NO: 306 - protein, 14 aa, Artificial sequence
  Autoantigenic peptide
ILSVHVATAASQDS

SEQ ID NO: 307 - protein, 14 aa, Artificial sequence
  Autoantigenic peptide
SKRLTFGWYRAEIL

SEQ ID NO: 308 - protein, 14 aa, Artificial sequence
  Autoantigenic peptide
AILTDAAHLLIDLT

SEQ ID NO: 309 - protein, 14 aa, Artificial sequence
  Autoantigenic peptide
KATGNRSSKQAHAK

SEQ ID NO: 310 - protein, 14 aa, Artificial sequence
  Autoantigenic peptide
AVDGVISVHSLHIW

SEQ ID NO: 311 - protein, 21 aa, Artificial sequence
  Autoantigenic peptide
VSSVSSQFSDAAQASPSSFSD

SEQ ID NO: 312 - protein, 24 aa, Artificial sequence
  Autoantigenic peptide
LAKEWQALCAYQAEPNTCATAQGE

SEQ ID NO: 313 - protein, 24 aa, Artificial sequence
  Autoantigenic peptide
KLKVESSPSRSDYINASPIIEHDP

SEQ ID NO: 314 - protein, 20 aa, Artificial sequence
  Autoantigenic peptide
IKLKVESSPSRSDYINASPI

SEQ ID NO: 315 - protein, 21 aa, Artificial sequence
  Autoantigenic peptide
MVWESGCTVIVMLTPLVEDGV

SEQ ID NO: 316 - protein, 18 aa, Artificial sequence
  Autoantigenic peptide
RQHARQQDKERLAALGPE

SEQ ID NO: 317 - protein, 18 aa, Artificial sequence
  Autoantigenic peptide
GPEGAHGDTTFEYQDLCR

SEQ ID NO: 318 - protein, 18 aa, Artificial sequence
  Autoantigenic peptide
EGPPEPSRVSSVSSQFSD

SEQ ID NO: 319 - protein, 18 aa, Artificial sequence
  Autoantigenic peptide
FSDAAQASPSSHSSTPSW

SEQ ID NO: 320 - protein, 18 aa, Artificial sequence
  Autoantigenic peptide
AEPNTCATAQGEGNIKKN

SEQ ID NO: 321 - protein, 18 aa, Artificial sequence
  Autoantigenic peptide
NASPIIEHDPRMPAYIAT

SEQ ID NO: 322 - protein, 18 aa, Artificial sequence
  Autoantigenic peptide
DEGSALYHVYEVNLVSEH

SEQ ID NO: 323 - protein, 17 aa, Artificial sequence
  Autoantigenic peptide
KGVKEIDIAATLEHVRD

SEQ ID NO: 324 - protein, 19 aa, Artificial sequence
  Autoantigenic peptide
FALTAVAEEVNAILKALPQ

SEQ ID NO: 325 - protein, 15 aa, Artificial sequence
  Autoantigenic peptide
KNRSLAVLTYDHSRI

SEQ ID NO: 326 - protein, 15 aa, Artificial sequence
  Autoantigenic peptide
GADPSADATEAYQEL

SEQ ID NO: 327 - protein, 9 aa, Artificial sequence
  Autoantigenic peptide
EIDIAATLE

SEQ ID NO: 328 - protein, 9 aa, Artificial sequence
  Autoantigenic peptide
NTCATAQGE

SEQ ID NO: 329 - protein, 9 aa, Artificial sequence
  Autoantigenic peptide
EPNTCATAQ

SEQ ID NO: 330 - protein, 9 aa, Artificial sequence
  Autoantigenic peptide
ERLAALGPE

SEQ ID NO: 331 - protein, 9 aa, Artificial sequence
  Autoantigenic peptide
QHARQQDKE

SEQ ID NO: 332 - protein, 9 aa, Artificial sequence
  Autoantigenic peptide
YEVNLVSEH

SEQ ID NO: 333 - protein, 9 aa, Artificial sequence
  Autoantigenic peptide
GASLYHVYE

SEQ ID NO: 334 - protein, 9 aa, Artificial sequence
  Autoantigenic peptide
FALTAVAEE

SEQ ID NO: 335 - protein, 9 aa, Artificial sequence
  Autoantigenic peptide
GAHGDTTFE

SEQ ID NO: 336 - protein, 9 aa, Artificial sequence
  Autoantigenic peptide
GDTTFEYQD

SEQ ID NO: 337 - protein, 9 aa, Artificial sequence
  Autoantigenic peptide
AAQASPSSH

SEQ ID NO: 338 - protein, 9 aa, Artificial sequence
  Autoantigenic peptide
SRVSSVSSQ

SEQ ID NO: 339 - protein, 9 aa, Artificial sequence
  Autoantigenic peptide
TQFHFLSWP

SEQ ID NO: 340 - protein, 9 aa, Artificial sequence
  Autoantigenic peptide
EEPAQANMD

SEQ ID NO: 341 - protein, 9 aa, Artificial sequence
  Autoantigenic peptide
GHMILAYME

SEQ ID NO: 342 - protein, 9 aa, Artificial sequence
  Autoantigenic peptide
MILAYMEDH

SEQ ID NO: 343 - protein, 9 aa, Artificial sequence
  Autoantigenic peptide
QALCAYQAE

SEQ ID NO: 344 - protein, 9 aa, Artificial sequence
  Autoantigenic peptide
EWQALCAYQ

SEQ ID NO: 345 - protein, 9 aa, Artificial sequence
  Autoantigenic peptide
LVRSKDQFE

SEQ ID NO: 346 - protein, 9 aa, Artificial sequence
  Autoantigenic peptide
VEDGVKQCD

SEQ ID NO: 347 - protein, 9 aa, Artificial sequence
  Autoantigenic peptide
YILIDMVLN

SEQ ID NO: 348 - protein, 9 aa, Artificial sequence
  Autoantigenic peptide
ESGCTVIVM

SEQ ID NO: 349 - protein, 9 aa, Artificial sequence
  Autoantigenic peptide
LCAYQAEPN

SEQ ID NO: 350 - protein, 9 aa, Artificial sequence
  Autoantigenic peptide
ETRTLTQFH

SEQ ID NO: 351 - protein, 9 aa, Artificial sequence
  Autoantigenic peptide
VESSPSRSD

SEQ ID NO: 352 - protein, 9 aa, Artificial sequence
  Autoantigenic peptide
GPLSHTIAD

SEQ ID NO: 353 - protein, 9 aa, Artificial sequence
  Autoantigenic peptide
SLFNRAEGP

SEQ ID NO: 354 - protein, 9 aa, Artificial sequence
  Autoantigenic peptide
HPDFLPYDH

SEQ ID NO: 355 - protein, 9 aa, Artificial sequence
  Autoantigenic peptide
HFLSWPAEG

SEQ ID NO: 356 - protein, 9 aa, Artificial sequence
  Autoantigenic peptide
DFRRKVNKC

SEQ ID NO: 357 - protein, 9 aa, Artificial sequence
  Autoantigenic peptide
HCSDGAGRT

SEQ ID NO: 358 - protein, 9 aa, Artificial sequence
  Autoantigenic peptide
LVRSFYLKN

SEQ ID NO: 359 - protein, 15 aa, Artificial sequence
  Autoantigenic peptide
KNRSLAVLTYDHSRI

SEQ ID NO: 360 - protein, 15 aa, Artificial sequence
  Autoantigenic peptide
GADPSADATEAYQEL

SEQ ID NO: 361 - protein, 16 aa, Artificial sequence
  Autoantigenic peptide
ANMDISTGHMILAYME

SEQ ID NO: 362 - protein, 16 aa, Artificial sequence
  Autoantigenic peptide
WQALCAYQAEPNTCAT

SEQ ID NO: 363 - protein, 16 aa, Artificial sequence
  Autoantigenic peptide
LSHTIADFWQMVWESG

SEQ ID NO: 364 - protein, 16 aa, Artificial sequence
  Autoantigenic peptide
DFWQMVWESGCTVIVM

SEQ ID NO: 365 - protein, 16 aa, Artificial sequence
  Autoantigenic peptide
WESGCTVIVMLTPLVE

SEQ ID NO: 366 - protein, 16 aa, Artificial sequence
  Autoantigenic peptide
VIVMLTPLVEDGVKQC

SEQ ID NO: 367 - protein, 16 aa, Artificial sequence
  Autoantigenic peptide
SEHIWCEDFLVRSFYL

SEQ ID NO: 368 - protein, 16 aa, Artificial sequence
  Autoantigenic peptide
WCEDFLVRSFYLKNVQ

SEQ ID NO: 369 - protein, 16 aa, Artificial sequence
  Autoantigenic peptide
EDFLVRSFYLKNVQTQ

SEQ ID NO: 370 - protein, 16 aa, Artificial sequence
  Autoantigenic peptide
DFRRKVNKCYRGRSCP

SEQ ID NO: 371 - protein, 16 aa, Artificial sequence
  Autoantigenic peptide
YILIDMVLNRMAKGVK

SEQ ID NO: 372 - protein, 16 aa, Artificial sequence
  Autoantigenic peptide
FEFALTAVAEEVNAIL

SEQ ID NO: 373 - protein, 9 aa, Artificial sequence
  Autoantigenic peptide
EALYLVCGE

SEQ ID NO: 374 - protein, 9 aa, Artificial sequence
  Autoantigenic peptide
SICSLYQLE

SEQ ID NO: 375 - protein, 9 aa, Artificial sequence
  Autoantigenic peptide
ALLALWGPD

SEQ ID NO: 376 - protein, 9 aa, Artificial sequence
  Autoantigenic peptide
GSLQPLALE

SEQ ID NO: 377 - protein, 9 aa, Artificial sequence
  Autoantigenic peptide
TPKTRREAE

SEQ ID NO: 378 - protein, 9 aa, Artificial sequence
  Autoantigenic peptide
PAAAFVNQH

SEQ ID NO: 379 - protein, 9 aa, Artificial sequence
  Autoantigenic peptide
DPAAAFVNQ

SEQ ID NO: 380 - protein, 9 aa, Artificial sequence
  Autoantigenic peptide
PDPAAAFVN

SEQ ID NO: 381 - protein, 9 aa, Artificial sequence
  Autoantigenic peptide
QKRGIVEQC

SEQ ID NO: 382 - protein, 9 aa, Artificial sequence
  Autoantigenic peptide
ELGGGPGAG

SEQ ID NO: 383 - protein, 9 aa, Artificial sequence
  Autoantigenic peptide
EAEDLQVGQ

SEQ ID NO: 384 - protein, 9 aa, Artificial sequence
  Autoantigenic peptide
LQVGQVELG

SEQ ID NO: 385 - protein, 9 aa, Artificial sequence
  Autoantigenic peptide
HLCGSHLVE

SEQ ID NO: 386 - protein, 12 aa, Artificial sequence
  Autoantigenic peptide
GIVEQCCTSICS

SEQ ID NO: 387 - protein, 14 aa, Artificial sequence
  Autoantigenic peptide
KRGIVEQCCTSICS

SEQ ID NO: 388 - protein, 16 aa, Artificial sequence
  Autoantigenic peptide
LALLALWGPDPAAAFV

SEQ ID NO: 389 - protein, 16 aa, Artificial sequence
  Autoantigenic peptide
PAAAFVNQHLCGSHLV

SEQ ID NO: 390 - protein, 15 aa, Artificial sequence
  Autoantigenic peptide
SHLVEALYLVCGERG

SEQ ID NO: 391 - protein, 13 aa, Artificial sequence
  Autoantigenic peptide
FFYTPKTRREAED

SEQ ID NO: 392 - protein, 18 aa, Artificial sequence
  Autoantigenic peptide
GAGSLQPLALEGSLQKRG

SEQ ID NO: 393 - protein, 17 aa, Artificial sequence
  Autoantigenic peptide
SLQKRGIVEQCCTSICS

SEQ ID NO: 394 - protein, 20 aa, Artificial sequence
  Autoantigenic peptide
KFGADARALMLQGVDLLADA

SEQ ID NO: 395 - protein, 20 aa, Artificial sequence
  Autoantigenic peptide
NPVEIRRGVMLAVDAVIAEL

SEQ ID NO: 396 - protein, 21 aa, Artificial sequence
  Autoantigenic peptide
QSIVPALEIANAHRKPLVIIA

SEQ ID NO: 397 - protein, 20 aa, Artificial sequence
  Autoantigenic peptide
LVLNRLKVGLQVVAVKAPGF

SEQ ID NO: 398 - protein, 20 aa, Artificial sequence
  Autoantigenic peptide
IVLGGGCALLRCIPALDSLT

SEQ ID NO: 399 - protein, 24 aa, Artificial sequence
  Autoantigenic peptide
VLGGGCALLRCIPALDSLTPANED

SEQ ID NO: 400 - protein, 20 aa, Artificial sequence
  Autoantigenic peptide
EIIKRTLKIPAMTIAKNAGV

SEQ ID NO: 401 - protein, 20 aa, Artificial sequence
  Autoantigenic peptide
VNMVEKGIIDPTKVVRTALL

SEQ ID NO: 402 - protein, 20 aa, Artificial sequence
  Autoantigenic peptide
MAKAAAVGIDLGTTYSCVGV

SEQ ID NO: 403 - protein, 20 aa, Artificial sequence
  Autoantigenic peptide
GLNVLRIINEPTAAAIAYGL

SEQ ID NO: 404 - protein, 20 aa, Artificial sequence
  Autoantigenic peptide
TIDDGIFEVKATAGDTHLGG

SEQ ID NO: 405 - protein, 20 aa, Artificial sequence
  Autoantigenic peptide
THLGGEDFDNRLVNHFVEEF

SEQ ID NO: 406 - protein, 20 aa, Artificial sequence
  Autoantigenic peptide
KRTLSSSTQASLEIDSLFEG

SEQ ID NO: 407 - protein, 20 aa, Artificial sequence
  Autoantigenic peptide
LLLLDVAPLSLGLETAGGVM

SEQ ID NO: 408 - protein, 20 aa, Artificial sequence
  Autoantigenic peptide
PTKQTQIFTTYSDNQPGVLI

SEQ ID NO: 409 - protein, 20 aa, Artificial sequence
  Autoantigenic peptide
KANKITITNDKGRLSKEEIE

SEQ ID NO: 410 - protein, 20 aa, Artificial sequence
  Autoantigenic peptide
KEEIERMVQEAEKYKAEDEV

SEQ ID NO: 411 - protein, 13 aa, Artificial sequence
  Autoantigenic peptide
QHLQKDYRAYYTF

SEQ ID NO: 412 - protein, 13 aa, Artificial sequence
  Autoantigenic peptide
RVLNIDLLWSVPI

SEQ ID NO: 413 - protein, 13 aa, Artificial sequence
  Autoantigenic peptide
YTFLNFMSNVGDP

SEQ ID NO: 414 - protein, 13 aa, Artificial sequence
  Autoantigenic peptide
DWIHIDTTPFAGL

SEQ ID NO: 415 - protein, 20 aa, Artificial sequence
  Autoantigenic peptide
RSQPGLCNMYKDSHHPARTA

SEQ ID NO: 416 - protein, 21 aa, Artificial sequence
  Autoantigenic peptide
FKGVDAQGTLSKIFKLGGRDS

SEQ ID NO: 417 - protein, 21 aa, Artificial sequence
  Autoantigenic peptide
GDRGAPKRGSGKVPWLKPGRS

SEQ ID NO: 418 - protein, 20 aa, Artificial sequence
  Autoantigenic peptide
RSQPGLCNMYKDSHHPARTA

SEQ ID NO: 419 - protein, 21 aa, Artificial sequence
  Autoantigenic peptide
SDYKSAHKGFKGVDAQGTLSK

SEQ ID NO: 420 - protein, 21 aa, Artificial sequence
  Autoantigenic peptide
FKGVDAQGTLSKIFKLGGRDS

SEQ ID NO: 421 - protein, 21 aa, Artificial sequence
  Autoantigenic peptide
SDYKSAHKGFKGVDAQGTLSK

SEQ ID NO: 422 - protein, 15 aa, Artificial sequence
  Autoantigenic peptide
ENPVVHFFKNIVTPR

SEQ ID NO: 423 - protein, 21 aa, Artificial sequence
  Autoantigenic peptide
VFACSAVPVYIYFNTWTTCQS

SEQ ID NO: 424 - protein, 21 aa, Artificial sequence
  Autoantigenic peptide
YIYFNTWTTCQSIAFPSKTSA

SEQ ID NO: 425 - protein, 21 aa, Artificial sequence
  Autoantigenic peptide
AHSLERVCHCLGKWLGHPDKF

SEQ ID NO: 426 - protein, 21 aa, Artificial sequence
  Autoantigenic peptide
AVRQIFGDYKTTICGKGLSAT

SEQ ID NO: 427 - protein, 21 aa, Artificial sequence
  Autoantigenic peptide
FMIAATYNFAVLKLMGRGTKF

SEQ ID NO: 428 - protein, 21 aa, Artificial sequence
  Autoantigenic peptide
AHSLERVCHCLGKWLGHPDKF

SEQ ID NO: 429 - protein, 21 aa, Artificial sequence
  Autoantigenic peptide
AVRQIFGDYKTTICGKGLSAT

SEQ ID NO: 430 - protein, 20 aa, Artificial sequence
  Autoantigenic peptide
CQSIAFPSKTSASIGSLCAD

SEQ ID NO: 431 - protein, 20 aa, Artificial sequence
  Autoantigenic peptide
SKTSASIGSLCADARMYGVL

SEQ ID NO: 432 - protein, 20 aa, Artificial sequence
  Autoantigenic peptide
GVLPWNAFPGKVCGSNLLSI

SEQ ID NO: 433 - protein, 21 aa, Artificial sequence
  Autoantigenic peptide
FMIAATYNFAVLKLMGRGTKF

SEQ ID NO: 434 - protein, 21 aa, Artificial sequence
  Autoantigenic peptide
ELKVEDPFYWVSPGVLVLLAV

SEQ ID NO: 435 - protein, 20 aa, Artificial sequence
  Autoantigenic peptide
TFDPHFLRVPCWKITLFVIV

SEQ ID NO: 436 - protein, 21 aa, Artificial sequence
  Autoantigenic peptide
VIVPVLGPLVALIICYNWLHR

SEQ ID NO: 437 - protein, 21 aa, Artificial sequence
  Autoantigenic peptide
VALIICYNWLHRRLAGQFLEE

SEQ ID NO: 438 - protein, 21 aa, Artificial sequence
  Autoantigenic peptide
GFTCFFRDHSYQEEAAMELKV

SEQ ID NO: 439 - protein, 21 aa, Artificial sequence
  Autoantigenic peptide
ITVGLVFLCLQYRLRGKLRAE

SEQ ID NO: 440 - protein, 21 aa, Artificial sequence
  Autoantigenic peptide
VALIICYNWLHRRLAGQFLEE

SEQ ID NO: 441 - protein, 21 aa, Artificial sequence
  Autoantigenic peptide
LQYRLRGKLRAEIENLHRTFD

SEQ ID NO: 442 - protein, 21 aa, Artificial sequence
  Autoantigenic peptide
ELKVEDPFYWVSPGVLVLLAV

SEQ ID NO: 443 - protein, 21 aa, Artificial sequence
  Autoantigenic peptide
LQYRLRGKLRAEIENLHRTFD

SEQ ID NO: 444 - protein, 14 aa, Artificial sequence
  BirA recognition motif
LGGIFEAMKMELRD

SEQ ID NO: 445 - protein, 25 aa, Artificial sequence
  Autoantigenic peptide
PERYGRTELLKDAIGEGKVTLRIRN

SEQ ID NO: 446 - protein, 12 aa, Artificial sequence
  Autoantigenic peptide
TCFFRDHSYQEE

SEQ ID NO: 447 - protein, 9 aa, Artificial sequence
  Autoantigenic peptide
FVIVPVLGP

SEQ ID NO: 448 - protein, 13 aa, Artificial sequence
  Autoantigenic peptide
KITLFVIVPVLGP

SEQ ID NO: 449 - protein, 13 aa, Artificial sequence
  Autoantigenic peptide
AGFKGEQGPKGEP

SEQ ID NO: 450 - protein, 18 aa, Artificial sequence
  Autoantigenic peptide
EPGIAGFKGEQGPKGEPG

SEQ ID NO: 451 - protein, 15 aa, Artificial sequence
  Autoantigenic peptide
GVVSHSFPATLETQE

SEQ ID NO: 452 - protein, 15 aa, Artificial sequence
  Autoantigenic peptide
LSGLPSGGEVLEISV

SEQ ID NO: 453 - protein, 15 aa, Artificial sequence
  Autoantigenic peptide
ISGLPSGGDDLETST

SEQ ID NO: 454 - protein, 15 aa, Artificial sequence
  Autoantigenic peptide
FFYFFTGSSQLEFDP

SEQ ID NO: 455 - protein, 15 aa, Artificial sequence
  Autoantigenic peptide
HAYSVTGAEEVESNG

SEQ ID NO: 456 - protein, 15 aa, Artificial sequence
  Autoantigenic peptide
SAFWPSLPSGLDAAY

SEQ ID NO: 457 - protein, 15 aa, Artificial sequence
  Autoantigenic peptide
CVDTRSGNCYLDIRP

SEQ ID NO: 458 - protein, 15 aa, Artificial sequence
  Autoantigenic peptide
VKEGHSPPDDVDIVI

SEQ ID NO: 459 - protein, 15 aa, Artificial sequence
  Autoantigenic peptide
EPVSGSFTTALDGPS

SEQ ID NO: 460 - protein, 17 aa, Artificial sequence
  Autoantigenic peptide
RDYFEEYGKIDTIEIIT

SEQ ID NO: 461 - protein, 13 aa, Artificial sequence
  Autoantigenic peptide
LGQQQPFPPQQPY

SEQ ID NO: 462 - protein, 12 aa, Artificial sequence
  Autoantigenic peptide
QLQPFPQPQLPY

SEQ ID NO: 463 - protein, 14 aa, Artificial sequence
  Autoantigenic peptide
PQPQLPYPQPQLPY

SEQ ID NO: 464 - protein, 13 aa, Artificial sequence
  Autoantigenic peptide
PGQQQPFPPQQPY

SEQ ID NO: 465 - protein, 11 aa, Artificial sequence
  Autoantigenic peptide
GIIQPQQPAQL

SEQ ID NO: 466 - protein, 13 aa, Artificial sequence
  Autoantigenic peptide
FPQQPQQPYPQQP

SEQ ID NO: 467 - protein, 12 aa, Artificial sequence
  Autoantigenic peptide
FSQPQQQFPQPQ

SEQ ID NO: 468 - protein, 13 aa, Artificial sequence
  Autoantigenic peptide
PQQPFPQQPQQPY

SEQ ID NO: 469 - protein, 26 aa, Artificial sequence
  Autoantigenic peptide
FLQPQQPFPQQPQQPYPQQPQQPFPQ

SEQ ID NO: 470 - protein, 11 aa, Artificial sequence
  Autoantigenic peptide
ALPTAQVPTDP

SEQ ID NO: 471 - protein, 11 aa, Artificial sequence
  Autoantigenic peptide
GRLFDQRFGEG

SEQ ID NO: 472 - protein, 21 aa, Artificial Sequence
  Autoantigenic peptide
MEVGWYRPPFSRVVHLYRNGK

SEQ ID NO: 473 - protein, 11 aa, Artificial Sequence
  Amino acid sequence encoding Gliadin-61-71
FPQPELPYPQP

SEQ ID NO: 474 - protein, 22 aa, Artificial Sequence
  Amino acid sequence encoding Gliadin-3-24
VPVPQLQPQNPSQQQPQEQVPL

1. A chimeric antigen receptor (CAR) molecule comprising an extracellular domain comprising an antigen binding domain, a transmembrane domain, and an intracellular signaling domain, wherein an affinity of said binding domain to said antigen is characterized by a K_{D} higher than 150 nM.

2. The molecule of claim 1, wherein said antigen is an MHC restricted antigen.

3-4. (canceled)

5. The molecule of claim 1, wherein said antigen is a non-MHC restricted antigen.

6-13. (canceled)

14. The molecule of claim 1, wherein said antigen binding domain comprises a single chain Fv (scFv) molecule.

15-22. (canceled)

23. The molecule of claim 1, wherein said K_{D} is higher than 400 nM.

24. The molecule of claim 1, wherein said KD is selected from a range of about 200 nM (nanomolar) to about 5 μM (micromolar).

25. The molecule of claim 1, wherein said intracellular signaling domain comprises the polypeptide selected from the group consisting of: CD3ζ (CD247, CD3z), CD28, 4-1BB (CD137), ICOS, and OX40, and CD137.

26. An isolated polynucleotide comprising a nucleic acid sequence encoding the molecule of claim 1.

27. A nucleic acid construct comprising an isolated polynucleotide comprising a nucleic acid sequence encoding the molecule of claim 1 and a cis-acting regulatory element for directing transcription of said isolated polynucleotide in a host cell.

28. An isolated cell comprising the polynucleotide of claim 26.

29. The isolated cell of claim 28, wherein the cell is a T cell or natural killer (NK) cell.

30. The isolated cell of claim 29, wherein said T cell is obtained from peripheral blood mononuclear cells (PBMCs).

31. The isolated cell of claim 29, wherein said T cell comprises a Treg (T regulatory cell).

32. The isolated cell of claim 29, wherein said T cell comprises a CD4 T cell.

33. The isolated cell of claim 29, wherein said T cell comprises a CD8 T cell.

34. The isolated cell of claim 28, wherein said T cell is a cytotoxic T cell.

35. A pharmaceutical composition comprising the CAR molecule of the cell of claim 28 and a pharmaceutically acceptable carrier.

36. An in vitro method of generating a medicament for treating a pathology in a subject in need thereof, comprising:
(a) obtaining T cells or natural killer (NK) cells,
(b) transducing said T cells or said natural killer with the nucleic acid construct of claim 27, wherein binding of said molecule to said antigen elicits a therapeutic response by said T cells or said natural killer of the subject,
thereby generating the medicament for treating the pathology.

37. The in vitro method of claim 36, wherein said T cells or said natural killer are autologous to the subject or semi autologous to the subject.

38. (canceled)

39-40. (canceled)

41. A method of treating a pathology in a subject in need thereof, comprising administering said medicament resultant of claim 36 in the subject, thereby treating the pathology in the subject.

42-44. (canceled)
